United States Patent Application Publication US 2022/0211063 A1 - sequence listing, part 3

SEQ ID NO: 7 - DNA, 8606051 bp, Penicillium roqueforti (residues 3,442,423-5,163,633 of 8,606,051)
  misc_feature (89140)..(89587): n is a, c, g, or t
  misc_feature (91419)..(91649): n is a, c, g, or t
  misc_feature (329894)..(330030): n is a, c, g, or t
  misc_feature (430781)..(431112): n is a, c, g, or t
  misc_feature (461664)..(461680): n is a, c, g, or t
  misc_feature (496398)..(496577): n is a, c, g, or t
  misc_feature (532001)..(532095): n is a, c, g, or t
  misc_feature (539751)..(539886): n is a, c, g, or t
  misc_feature (569534)..(569738): n is a, c, g, or t
  misc_feature (649051)..(649187): n is a, c, g, or t
  misc_feature (691112)..(691174): n is a, c, g, or t
  misc_feature (866526)..(866690): n is a, c, g, or t
  misc_feature (1032440)..(1091839): n is a, c, g, or t
  misc_feature (1092526)..(1092737): n is a, c, g, or t
  misc_feature (1210194)..(1210406): n is a, c, g, or t
  misc_feature (1240552)..(1246824): n is a, c, g, or t
  misc_feature (1247751)..(1253683): n is a, c, g, or t
  misc_feature (1258302)..(1372301): n is a, c, g, or t
  misc_feature (1374135)..(1374543): n is a, c, g, or t
  misc_feature (1457542)..(1457828): n is a, c, g, or t
  misc_feature (1505355)..(1505527): n is a, c, g, or t
  misc_feature (1513226)..(1513388): n is a, c, g, or t
  misc_feature (1624048)..(1624249): n is a, c, g, or t
  misc_feature (1669160)..(1669365): n is a, c, g, or t
  misc_feature (1761186)..(1761412): n is a, c, g, or t
  misc_feature (1817726)..(1926025): n is a, c, g, or t
  misc_feature (1933126)..(1933376): n is a, c, g, or t
  misc_feature (1963938)..(1964315): n is a, c, g, or t
  misc_feature (2150469)..(2150567): n is a, c, g, or t
  misc_feature (2196699)..(2196907): n is a, c, g, or t
  misc_feature (2250693)..(2250749): n is a, c, g, or t
  misc_feature (2391495)..(2391786): n is a, c, g, or t
  misc_feature (2493532)..(2493763): n is a, c, g, or t
  misc_feature (2532138)..(2532415): n is a, c, g, or t
  misc_feature (2536284)..(2536525): n is a, c, g, or t
  misc_feature (2786532)..(2786788): n is a, c, g, or t
  misc_feature (2859489)..(2859780): n is a, c, g, or t
  misc_feature (2873900)..(2875004): n is a, c, g, or t
  misc_feature (2881521)..(2881826): n is a, c, g, or t
  misc_feature (2897075)..(2897253): n is a, c, g, or t
  misc_feature (3050650)..(3051374): n is a, c, g, or t
  misc_feature (3057165)..(3057416): n is a, c, g, or t
  misc_feature (3069515)..(3069890): n is a, c, g, or t
  misc_feature (3075746)..(3076120): n is a, c, g, or t
  misc_feature (3305143)..(3305240): n is a, c, g, or t
  misc_feature (3318429)..(3318753): n is a, c, g, or t
  misc_feature (3502740)..(3502854): n is a, c, g, or t
  misc_feature (3538027)..(3538610): n is a, c, g, or t
  misc_feature (3783442)..(3783656): n is a, c, g, or t
  misc_feature (3992300)..(3992418): n is a, c, g, or t
  misc_feature (4005200)..(4005463): n is a, c, g, or t
  misc_feature (4027390)..(4027590): n is a, c, g, or t
  misc_feature (4058485)..(4058631): n is a, c, g, or t
  misc_feature (4267325)..(4267362): n is a, c, g, or t
  misc_feature (4352819)..(4353281): n is a, c, g, or t
  misc_feature (4361818)..(4361970): n is a, c, g, or t
  misc_feature (4393748)..(4393981): n is a, c, g, or t
  misc_feature (4451480)..(4451617): n is a, c, g, or t
  misc_feature (4461509)..(4461755): n is a, c, g, or t
  misc_feature (4481215)..(4481333): n is a, c, g, or t
  misc_feature (4533880)..(4534017): n is a, c, g, or t
  misc_feature (4590140)..(4590368): n is a, c, g, or t
  misc_feature (4668962)..(4669294): n is a, c, g, or t
  misc_feature (4737136)..(4737230): n is a, c, g, or t
  misc_feature (4766758)..(4766955): n is a, c, g, or t
  misc_feature (4834538)..(4834845): n is a, c, g, or t
  misc_feature (4927504)..(4928077): n is a, c, g, or t
  misc_feature (4945086)..(4945236): n is a, c, g, or t
  misc_feature (5082742)..(5082890): n is a, c, g, or t
  misc_feature (5112783)..(5113504): n is a, c, g, or t
  misc_feature (5314860)..(5315053): n is a, c, g, or t
  misc_feature (5372796)..(5373223): n is a, c, g, or t
  misc_feature (5459177)..(5459288): n is a, c, g, or t
  misc_feature (5480488)..(5480661): n is a, c, g, or t
  misc_feature (5535630)..(5535644): n is a, c, g, or t
  misc_feature (5567778)..(5567917): n is a, c, g, or t
  misc_feature (5599006)..(5599219): n is a, c, g, or t
  misc_feature (5727051)..(5727129): n is a, c, g, or t
  misc_feature (5743562)..(5744030): n is a, c, g, or t
  misc_feature (5807724)..(5807810): n is a, c, g, or t
  misc_feature (5920056)..(5920734): n is a, c, g, or t
  misc_feature (5922048)..(5922354): n is a, c, g, or t
  misc_feature (5942930)..(5943209): n is a, c, g, or t
  misc_feature (6011395)..(6011690): n is a, c, g, or t
  misc_feature (6325216)..(6325534): n is a, c, g, or t
  misc_feature (6397626)..(6397737): n is a, c, g, or t
  misc_feature (6604883)..(6605053): n is a, c, g, or t
  misc_feature (6843817)..(6849568): n is a, c, g, or t
  misc_feature (6859923)..(6860563): n is a, c, g, or t
  misc_feature (6915280)..(6916067): n is a, c, g, or t
  misc_feature (6919371)..(6924241): n is a, c, g, or t
  misc_feature (6950690)..(6950826): n is a, c, g, or t
  misc_feature (7010241)..(7010478): n is a, c, g, or t
  misc_feature (7088835)..(7089058): n is a, c, g, or t
  misc_feature (7281128)..(7281307): n is a, c, g, or t
  misc_feature (7435487)..(7435612): n is a, c, g, or t
  misc_feature (7580177)..(7580497): n is a, c, g, or t
  misc_feature (7598174)..(7598323): n is a, c, g, or t
  misc_feature (7639388)..(7639504): n is a, c, g, or t
  misc_feature (7648598)..(7648805): n is a, c, g, or t
  misc_feature (8007544)..(8007730): n is a, c, g, or t
  misc_feature (8053265)..(8053730): n is a, c, g, or t
  misc_feature (8129413)..(8129828): n is a, c, g, or t
  misc_feature (8134123)..(8134311): n is a, c, g, or t
  misc_feature (8188405)..(8188554): n is a, c, g, or t
  misc_feature (8240083)..(8240554): n is a, c, g, or t
  misc_feature (8245992)..(8246103): n is a, c, g, or t
  misc_feature (8305274)..(8305864): n is a, c, g, or t
  misc_feature (8314230)..(8318347): n is a, c, g, or t
  misc_feature (8345692)..(8345793): n is a, c, g, or t
  misc_feature (8408069)..(8408275): n is a, c, g, or t
  misc_feature (8424960)..(8425085): n is a, c, g, or t
  misc_feature (8481845)..(8482068): n is a, c, g, or t
  misc_feature (8597364)..(8597610): n is a, c, g, or t
tcgaagtgtgccagcagatcgattagatggaaatcctgcatcagaagcgggccgttggggccaatgcgctgggaagcctggggatccatgacctatatgtatatggttagaccttacgattaaagggaaataggcagggcctactgggcagccgttagaggccgtgtagaccggagtctcattgtagcggtaggttcctatgaaagagaggggattagtcaatgttatcggctttgacaaggaatgtaaacctactaggctcgttgtcttgacccatgatcgcagattgtctatggagaagagagaaaagtcccgggagcactttggtttatatagggccttcgggggaaccatggaaaagttcaatgaagcccatagccccaccagcatctgatatgaaatcatcctatcaccaactatattgatataaaacaaacatctaaaatgccaggcctaggtcagacgtgtatgctatatccaatcgtaaacaaggccgatgtcatcctctcgggtccacttcccggaattggagtaaaaaaggacaaggaataggtttgtaagtggatggtggccagaccgagagcaagaaatgccaggaggtcaattgttctcccaatatagcagttcgatccgagctcaagcttgtttgttctgtcggcacgatccgagatcgcgaccccgaagatacgaacttggccttgcagagttgttgagctgcagacaagtcagttaatccgcaattttatatccaacaaattcattggactatctagttatcagagtgtgacagcaaccgaaaattccaagggtcagtcccttcaaggtgttgcgcaaggcagtgcctcgacaaagaaccctggatagtgcttcccttagaattagtgcaaggaataatcaaaagctcccagtagagtcgtgcgtgcacagaggattgaaaacaacaagaaaccaaaaccaaaacaaaaaaagctcgctcaatgcgccaatcatatatcttgtatatcgcagggaaagggaaaacccaaagcaaattgagccctgatcaaatcataagaatgggtgggtatatatagcgcttgcgcttcttgagagcctacggatcaatctatttaaaggggcaccaagagtatgctgcaagtgcatgcatgggaaggaacaaggtttaactggtaggagtgggcgccaaggtgatcgcaggcgagttagtggactcatcccgacatcccgacatgtttcccaggctatcacaggtcgaggaagagggcgaggcagaagtagcggtagtcgtagctaccgtgctcgttccgtcacggcagccaaaccaccctgggtcatgacagctggtcgttgcagtcaccgagggcaaagtagtagtcaccgtgggtgacggaatggctgttgtggtaggatccttgcacccgaaccagccaggagtcttgcatgtagtagtagtggcagtgcttgtcggtgaagttgttgtcgtagtggtagcggttgtactttcatccagacagccccaccacccgggggtcttgcaagtagaagttctggtgggagacgcggtggtggtggtagtcgtagtagtcgtgacatcggagccgttgcttcggaagaacttccagagttcacagtcaaagcattcttcctctgcgacacatgaagggacattgtcgtatttcaagataacatcagatatcacattctcgatcttgtgggtaccaagaccgacacgccagcccttgtctgccacagtgtcatacgtgcacatttgtccggtgtgacatgctgactccatcgcatagccgccccatgtacaaatagagttgattccattgcaggttcccatatagattgggtctgctgtatgtccaaagtggtaggatccagtgaactgtcgcgactgtggaaaccgcgggtcatagcctggcggacttgggaggccaagtcgagctgcgggcaatgcttcaggaacggcctcgaaagtgaccacaggcaatccgaacgtcaatccaaccagactcgtcatggcaccacccagcgaatgaccggtcatccaaatatttgcatctgggtagatctcggtaacgttagagtatagatcgatcgctgcccgataataacggttttcgtcattcatagactcaacgatacatgtcagatttgccgtaaatgtagcactctggcaatcgcaggattgtctccatagatatgagcctccttggccacagcaacaactaaagaatagattatcgttgactttatcgtttgttgtggtgccagcgccatcaaagagagcgggcgaagtgcccttcagagaaatgacaacagtgtcattcgtcttatcggagtagatgtgccctctcaggccatccgtttgccaaccaaagctccccgaatagttgaatttgccattaatagtgtgccactctcctgttccaggctcctcaatatagtcatttgcagtcatttgtgcaaatgtcaaaacagtctgcttatctgtaatattcggtccaggcaaggtgtccatgacccattccagtggagacaaggcggtcgcaaagcccgaagaccgtgcagctgccaagtgaccttgaatcacctggagtcgccgatcggctaatcgttgtatcgtgagaggacttgatgaggcaagcagagtggaatctgatgcaatatattcttcttcgtggccatcttcggatatagttcgaaggcgagtgtctggcttgacgtcgagtctcgcatgaaagtcgggttgttcataggtgcctcggtgaaagatgtggcgcaaggactataagcgggtatgatggtcagctacagataagaaaacttgagtcaggcatcttacaaactcatgggtgtctggtgtaccctcgtccccattcaaaggtatgacgggaacttgtggagagggtagatgatagcctgaggcggaggcagcacctgacaatactgcagccgcaaataataggctgcggatgctgatttcaaatcgtgaacattttcgagccatgatggggatgctgatgaggatcaaggtcaaggagacgtgagtctatcgcggttatcagcaagtcacttatcaagtgacgaagtgacgcagtgcggagagcgatcggcacgtgatgggtacccccgtgacgtgatgcgatatcgtgtattcctcgtcaatttggtgtcttctcaaatgatcactaggagagtgatacgctgctgttgatcagctgcagtatactccgtgacaagtacggagtactccgtacttccgatcgctttactactggacaacaggctcaggccagagctaggggctctcggacgcggatcgacatcggcctatcagctgcatccgggagcggagacacgcaattagtgccttatagaaccccatcgcccctggtcttaaaatgtctggctctgaaaatagcagtcggcctcatctgaatctagcacggtcattcatcagaatgggcgactcggaagtgaaatctcctacgattgagcaagattccaaaacagcacctccatcgtcacctgtcaataatgaggggcaggaaaatggactcgacgtattcgaaagaccgggctccgcagactccggcacaacaggcgatgcccagacagatgatggctttgtgctttcgcgaagcgtacaagacccttcggaggaattgccgatcgaactaatcagcctggcagatcggtaagcgtgatcatatgagtgcccatgcttcaacgttttattctgacagccatttctttaatagattcgtgaattctctgagcgccaaagttcataactcgcctcccacgatcgagaagatctccgagctcttccaagttttctacagccgcgccgagtcccacattgccacacatatatctgctctcatagctcgtatcaaccgggatcttccgccccaggttcctgcaaaagctccacgaggaagcgcactgtcgaaattgagcagtaaacgctctcaagacgatatcaggccagcagcttcaggtcgccaaatgttgactgcgtccgaggtggctgaaaagcgacaggctcgcagagcccttgaaaacaaaaggagcgcattagaagaggctgccgaaagaagggtctgcgagctggtttatgataaactctggaggcacaaaagtacattggatgatgtgcgggatgaaaagttgcgttccaagactgcggctttgctgctggtcggcattaatctaaaggatcttgggatcgatatagaccttgaaacaatcgatgagcagaagcaggacgaagcaaacgaattcctttgtcaggcccgagagtatctcgccaaaatgaacgattacaaatacccccttggaaagctacagcaactcgcagcggcgcacaaggccatcgtcgacgctctcactaaacttttaccgtcttcctcttctgcggatgagattctgcccacgttaatttattcgcttgtgacgtgccctccggaagggatcaacattgtcagcaacttggtttttatccagcgtttcaggtcttcaagcagaattgacggagaaacggcttactgcttaaccaatctagaggcggccataagctttttggaaaacgtcgatctttctacactacgtgccgatgagctgcaggatggccctctgaaaacccccggtgaaactacgacaccatccgtagaacatgtcgatccttttcggccccccaaggaggctacaaccttggctgtgacgactgtatctgcatcgccggaattgtcaacaccagaaatcaaggaacccgcctctacattacctagacctcgaccctccatcacaccacagcaacgacgcctcagtaacattttccaaccgccttctaaggtcctcggagctgcaaatgatgctgttcgcaccactgcagaccagagtttgaagaacattggtgctacattggacagcagtttcaactttctgtttggtcgtctgaaggagatgcaaaacatccaaggaccaggcccggagggtagcggtccaatattgccaaagacactggccgaagctcgccgtctagtgagcttgccgcttgcctctgctaccaaccaaaatctgacccaaggggagctcgcagcaatcaattctgtttccgtggatgagagcacacccccacgcagtagttcgagactcacagatctctccaacactcctacctctcgagaccgaagtgtggacagcactcgaacccagggaagcggtaaaaagtccgtcacgacatcactacgcgaagattttgcattgagttcacccataagccccactccgttagaatcaatgcgaaactttggcagcacgcttaaccctctgaaccacatcccgggcatgatgaagagctttggccgcaacgcaccagagactcccagcggcaggtccgtatccccatcgggattggacagactcaagccatcacctgtttcagcagacggcaatagtggttctaacagcccgctctccaacccttcatcgaaaattgatcctcccattcagcgtttccttgagacacagaatgcgagtgatctccggatcggggacgtagctgttctactggaagactataagcgacttgctgctgcgcttcacaaacctagtaccgagtcttgatatgtttatggttggattatgttgttttgtccttcacattcattgcaacgggagatggagtattcttgcattatggatcgatggcgttattatatctggtattctatttcatttgggcgaataaaccttgagttagatagcatagctctggcgagtgagctacgcattgtccatatcatacatcattttagcaataatcaacccttcagaccaacatgaataaggatttcaagattcggagatagtgtgcacagttacatgttttgcttattcgttcaatatcccgaaaaggatgcttttgttcaagttggagatttacatgaagcgcacaggcggaggccaaatcctatccttctcccctggagcatccttcgaccaacgtgctgctttatgaagcattttcaactccgatatgttgcgatacggctgacgatttacctctggggaaagatctcgttgggtgaaacgcgcaaaaagtgtcggagcgatgtggttgatatgaaccttgagtggctttgcaatgttttcattgtcaggttctagtaaccagacgaatggcctaggaacatcacacgattgcaaggaatcttgatccacatagagaaaggagtctcgtcgtagaccaacagggaattcgttgctgtctcgcatagaagcgaatcgatcccggaaattaccggtaccatcaccggtgtcatcattttctacccaatgaagagcaaactttgcaaaagcagattctttcactaaggtcttagcacattgtaagccgtgttgaacggcagtttggatttgctccttgtacgacggccactcctggacatcacaaatggtaattttcggcgtcaattccgcaggtcctcatattctaggtgtaaaaggggtataaaaatatgaacatgaataaatcgagtcctgcagtggctaattgggcataacacaatcatctcaaacaacataagggttaatgataagagtaagagagctatttcgcaatcacgggtggcgtccacgcagaacctctgcaccgccagttctcatctcagtcaatttattcgtcaactccaaactttgtgtttcaacttggtcatggcggcgcttgacttcggcttcaaacacagcagctgtgcgacgacgggcacgccgtaaattcttcatttccgaaagaagatgggtgaaacggtcgatcatttggtctccacagtcttcccattcatccatggtcatgtgggacaaatatgtttggcgttcttggtccgtcagagtcaacagatgggagacggaattattgggtacctcagtatctgtgacaagagatggtgggtttggcggtaaggaaggtgatttgatgacaggtggaggaggggtcggcgatttgtcaaatggctcagcttggagttcagagaaagacttttggtaaagcacttctggagggtagtctgcttcaagtgatcgctttttcgaatggatggcagtgttgcgacggctgcgacgcgatggctcatgcaatttgcgcgattcgtgcacaaaaaacggatcctgcatggtgtggtcgacgtctaggtcggttaaactggtcatatcgaaggcactgattgaaaccccgccgctttcccgtcgttcatccgggcgtatggtgtgctccatgccatcgtcacttccaccgtcactatcggtaagttcgtgaaacgatgtaatgctgagtgtccggccaacatctggcggaggttgagagtcatggcgagtaggtgatgcatcgagttgttggtcgagttgttcgagaagtgaaggctttggcgggctgaaacgtgtcctgggtattgctgacgagctgtgagggagaagaatcttcctgggcccagtaggaggaagcatttgacccaatttccgcggccttgacgtcggttgtggttgtggttgagtctgaggctcgggatcagagtctatagtgacaggctgccgcgaagaagttctctttctgctggcggaccagaaattctctaggcgcttgctcaatggctcctcggttatacgtgatttgtgcgacgcatgccagtcgtgtgcttcgtcggtcttttcattatccccgccgtctccgccaagagacgaagtcatttggctttcagagtcatcgaagtcatctgaatcaaagccggccttcttcatggcttggtcacccaggccttcataccagttaggcccataagtatggattgaaggtcggggctgatacatcgattgaggatcggggttggtgtaggcagcattagtacttgatgctgcctgagatttgttgtcatcaaatccgtagacactagtccctgccacggttgaatcatcaatcgcttccacgtctgtgtcgaacacgtccctgtcccgctgtatcccatgcgtagagagattccgggactgatttggaaattgagatgtaccgttaaattctagagatccagatctgccattggcccctgaaggacctggatcgaccagctgggtgaccggtacctcgactctggcttgttctgcacgttgctggcgcgactgggtggcttggccgtgagcctgcccaccttctttggagtggacataatcgccaacccccatagtactttttgaagctagctattgtaggggtaatgaataaatgtggtctttttcgatgacgctgaaagacgacggggtccaccgtaaggttgttgggcaaacgcgatatcgccgcgtagtcacgtgtcgatcatttccaccggctttaagcctcatctacagcaattagggccgccacggctgtatggaaccttacagcggcggtaacctccgggtataaatcccgaacaacatttagctaatgtgcttgactaaattgtgaataccagggccaactaacgccacataagggtgtaaatctttctctaggatactgggcaagggaggtttctaattataagataatgtttacctataaataaatgcatttcattggggtatattaagtataattttacatgaagttccagaagagaggaacatcaagatcatctcaaccaggacctcaatcagcagaatcatcatcaatatgaagactctccagattgtatgcaacacccctgcctcgtttcttggccttctcgaagagctcaatcgatctttggacttcagctgctttcttttcggttgcaagcctgtgctcacgtctcgcttcaagagagcctggggtcctatccatgagcattgggtcgtggtcgtcgtagtcttcgaagtgggccggtaatggtagagtgagcagcaacagatcaccgatccacaaacagatcatgcctctgagctccagcaattctggcgagtccgagtatggaggagaccctaggagctggtccatacgcgcagcaatttgctgcgcctgtgccaactccagtgccctaattgctgtgatggcagcatctgtcttgttttgtgacttccgagggtggccaaattcagattctgaattgtcatcctcagaaaactcatcaggctcttcttcttggcgaagggtaatatttttcctagttgccttgctttcttcctgtgtgatatacacccaaagcccaaacattgcagggtagaagtgcaaagaggagatagactgtggtgaagatttcatgaatgggtgattgagaataagtcgttcataatattctttagctgccgcaaagcccttggtggtaaaattgatgggtgtgctgtccatcgcattcggcaccttaatggtaccaagattggctgggatttcctgttcgtcacgccgtagcaagatttcagcgccaatgccccaccttccttcactgcggacgtccattcgaaagcctctgtaatcttcgcgcaagatcatgccccaagctcgtccggctcgaacgtaatcaccttggagcatacatcgatgtaaaatggctgtcaatgcacttaggtgttggaagcgaaggttgccttgctgggtcgactgaggagggtagattggaggtgataatcccgctaagtctttgaggtggcgtgaggcagtctctcttctagattgctcatcattatctgccttatgagggaaatggcctttcggcaattcttggttggatgggaaaccggcaattcggtattgatgggattcatttggtgtcaagaccaagggaggcccagcgggctcagattccgtagccgaggcgatatccgttgtttcttcgccgttcagctcgctttcactccaccccacactccttttgcgtttccggcggtcatatcgagatacgcgagtgccaggcggctggagccaaggcggtagcggtagagaaaaaatcgaagacgacagcgcagccatatgctcaagatggggcgtattccatgtgccgccaaagaaaataagagccgtggcagtctatactagggcctaggctattgttgccccaattgatggttgcgcatttgtcagagagattggtggtggaacatgacggaatggagatgtgttgcctcaggcactcaaggcgaagcaaagcaggcaaacatcatcacttatcgtcctctatcaattgcttgctttgacatgactcctctactcctccttttactttcccttttcttctagttccccctttttgttttgccgagcgctctctcacccccgtttcgcgcttgccagtcgctggctgttcttttctgggcgtggttaccatagctccccgagattcaaggctcggcggttataccactcggagtgtgggctgtgcctagactcatcagacagtttgatacatctggccgctgttgctcgtattgggcagtgaaattgtctcaggcgtctcgtaccttttgcaaataacccggtaaccgcgaactccctgtccgctatccactcctttgttccaaaggtccgaaatacggcttcttcagaagcaccacccaaaaaccaaccgcatcgaccctgtcagcttgagcaagggatcaacaccattcccagacatcacttggatagccttacttgtcaaatccatctcctaggttcaacccaatatcgatacggtcgccgctactagccatatggtcctcgcgtggcaatgaacagtcgttgacactgcatcactccaacggtcacaactctgttactatgggacagtcctcttctacacaacgtgatccatccaacaacggctatcgagtacactttgcacctttctcaatacagcgtggccctaacacgagggatgaaaacatgaatcatagacaggcggctgaacacaacggagagggtggtttgccaccccggccagacatgaacatacataataggagtgaccaagatatggcatccgaccggccaggccgaacctccgctgggggctcacaacctatgcgaagtatcgaagaggagggcgggcccgaatatgagctcccaccccgcgaataccgcactgcggcgtttgctcgaatggcagcacgaagacaatcgaccatgtcaagactgggctctaggcttcttccaaattcagtcattcgtggacttctcaacagtcaagaagagaccccggccgagggacatgcacatcgacacggcctagtctctccaagagctgagactgctcaaacatccggtcggttcagtgcgttcgattcattcggctccagaggaattactcggcgccgatctgctcgcgcgccatatttcattccaccccgtccggagtctgctgggatcccagatgcaccagcaaccccgacatacatcgactctccatctcaaatacctgacccgacaagagcatcctggcgtcgcagtgtcaggctacaacgcatgcgtcattcgatttcatctcccatttctcacatgttcggccagccacactcagatttgcggccgcacgaaagcccggaatacccaatgtcagatcctttatttgatgatagggctatggacacgcgtctggacttcggcgaacccccccatgaacttgaatcactagaaccatcaatccaggctgagaggccggtaactgattcgtcttctgcgcagccgagtcctgctttgatgcgccgattgcctgggatcatccgagcaagatcatccagagtcctgcgacgagaggagcaaacacctctgtcaagggtccttcagctcgccgcatccgcaattgcagctcagctgtccggcactgccggtcctgcgttgcctaacatccaggcattgggcaatgacgggttagatggctctttggagaatttcatccagagtttgcagcacgcgacttctgcgcaggctcaaccgcctgcagcagacgggtcgagcagtactgcaaacgaaggaccctcgcatcccgtcaatttcttgcgtgtgttccgatttgccaattcagaaccatccacaagcggcgctgcaaggcagagcgcgagtggtgtcggcgaccatgggacccaaaccgatggaatggacatcgacgagcctgctgaaggcgcagggcgaacggttacactggttgtcgttggagttcggtccgtcctggccggaaacgcaggtcataccgaacagcaacagcccgtaagtccgggcccaggtctagatgctctgcttggtctgccatttttgccacataatactactatcccacggcctcaagatgccactggtgaacctacccaacggagcgatgggcgatctagattgactcttcctcggaaccccaccggagctacagaacttccacgcccgtcagttcccaatcactttagaagaatgtctgataccggcccccgtgctggattcccatcctatcatccgtccggtttctctgaaagtcccccggggccacacccgcctccgtcaacaccagctgaacaggggatatctgctttatcctccggcacttcgactccgagccgtagaccatcctccgcttcagcaattgctcctgatattctgccccatctacatgaaggccaggcaatgcgaccgacggcggagactctggatgagcctgtgacattcaataccgctcgccagcgacgtcgaagcgattctgagtatgctcgtcatcgggccctcggctctggtgctgttcgacgcaatggcatggttgaacccgatcaacccccaccaagtggaggtcgcagttggttaatttatgttgttggaaccaacctttctgaaaaccacccggctttgaccacacctagtcttttcaccgatgtaagaatgccctactactcggctttgtcaggaacatgatgactaatactttaaacagaacccaacctacgaggatatgatcctactttcatcactattaggtccagctaaaccccctgtcgcctctcagaccgatatcaactccgccggcggaatattccgtcttgtcgagtatgcaggttcattggtcgccgaagccgtcgaaggcgctgcctccattcaaatccaagatggggagcgctgtttgatatgcttgagtgattatgaggtggcggaagaagttcgagagctgaataaatgcaaacatgtcttccacaaggattgcatagaccaggtttgttgcctctgtccattcgatttcaatctgttcgcttgctgaccgtatttcgtagtggttaaccactgggagaaactcttgtcctctctgccgaggtcaaggcgtcaacgaaacccccagcaacgactccaataccgacaactcggtacccagtcctgcccctgctccggctccggctccagatggcacagctgtctgatctcttccacctagcaagcatggtcaacccaactatgtgagcaactcccaccttttggctttcgaaattcttctctccttttagctttagcatgcagcgtgtgtttagaacctgtaacgatttttttctccatggatatcccctttgcatctcatttctgtgcatcgacttttggtgcttttatcatgttgggttatcgaatatttggtctcggcgcctagaaacaaggaaccctcctcttggaagataactctgacttcgagcctcgagaatgttagtctttacgtctatcaattgttggtcttcgtttgttctttgtaatttcgtaaattgacacattggctggccatacccatggctctatctggctaggaaatgttctactcattgaaatacatgtacaaacaataaggctatacaaccatctatcatattattgccattgatgttccctgtatatatacgtggtagtataccggggcccgctgccccgcggctgacttaggtaatccaaaaaaaatcacccaactccattgcggcctggattgcgccagcgatcttgtgctatttcgtttattccctaagctttgagagtagaatctgcagtctctctaacaaaggcagtactcaattgacctcaccgcatccgaaaaacggttcggccgtgtagtctacactttcaacctccggagtccgcattttcacgacaacccccgctacaacccaccatgacttccccgattcgcgtcacagtcctcatatctggcaatggctcaaacctacaagccgtgatggataaagtggccgcaggtcagataaacgcaacaatcgtccgcgtaatctccaaccgcaagaccgcatttggcctcgagcgcgcaaccaaggccaatatcccaaccgaataccacaacctggtcaagtacaagaagcagcaccccgcgacaccggaaggtattcagctcgcgcgcgaggaatacgatgccgagctcgctcggctgatccttgtcgacgcgccggagctggtcgtgtgcctcggcttcatgcatattctctcaccgcagttcttggagcctctggaggctgctaagataaggattattaacttgcaccccgcgctgcccggggcgttcaatggcgttgtaagtcctagagctctttttgagattgtacattgttagctggaatgatatgctgatacctgtcttgttgatttttagaatgcgattggccgtgctcatgctgcgtggttggcggaccagattgacaagaccggtgttatgatgcacgatgtcatttccgaggtggatatgggtacaccaattctagtgcgggagatccccttccggaagggccaggatgagaacctcgagacctttgaaactcgggtccatgagatcgagtggggagtcgttgttgaaggagtggataaagtggtaaaggaattgatggcccagaaagaaaaaggctcaagtgcatgaatagttacccatttgtcttgggtgacattattacttcgcatggtgtacgaagggacgccgcgcttctcgatctgcattttgttggaccaatgatcgacctaggactgcaagtcccgcatgatgccatcttcggggctgttgacgatttatgactgtatatcttgtatgattgcagaaaaacaaaaagacatatatatgatcatattgcaaggtgtatatttcacgtgttctggggtgccaatttggagatcaaagccgcggcgtggattaagacaagaccaagacatccactaccaactggaggaaagccaagaacgtgccgagactaccgttcagacatacttcgtatccacgtggacaatcatgattcatacctgtctcatggtacggaagcacggagtcatgatagtggaaataagaaatggagaatcataaatccaacggcgccccaagccaagctccttgataatcaacagggatgtggaatgcaaccatttcaccggtcgaattctcatcacacgccagtcctgcacggcggatttagctgcatactagcccctccaatagggaactatactatctttgggaagtttatgcctggctaccctacggactagtccattcaaagtcaggcttgcgaaccgcatttgaactatgtctcccacctgcgcatcccgggtaatcattcgggggatttgtatgaccccgccttatctgtaacgtaggacagatcataaacgcagttcacgcgggaaaagcatacactagcaaaagagggtaggcgtggtccatgcagtgcaaccaagacaaaaaagtgggcaatcagagcgttgcagcgctaaggtggccgttggacctatgatcgtggcgccaacgtgatagatcaaagtcaattcctaacgtcttggttcaaggttgtctgatggctccaccgttcctaattccgtcggatgttgggcttgatggtggattgcaacgatgtgggttacttttggccccaaattcacaccggcgttaactcaagctgtccggacatttgagatcggcgaatatcatatccatttcgagcgcggactgggatctgtcatggccaagtttgggggctctgatagtggttatgctttgcttgtttcatgcgcttgatacaacatagacgataataactgaacccccattttgtacagtgaagacagacatccgaggttataggatgatcattacttgacctgatactattttgaaaatcggggtagtcagctccgactgccgagaataggaccaaccactttatatccacctattaggatagtacggagtatatatccatgactatggtaaaaaaatcaccacaacactgctttataatacctttaacccgccatggtaaccaataatagagagcttggcttgtaaacttccgggccgacatatttttacaagaaagacacttttcttcgtggcgcgcaatgacgacaatcttgaacaaccttttaggaaaatgcgcaatacaaagtagacctctaggaacgaactttgatctcggcatatcaaaaaacagaagggaaaaaagaacaaaaagggggtgataatgacgatcccaagccacagggatgaatccgagtggtcttcgggcttggccaggcctactacaatgcagaggatcatgatcatagcgtctatggatctgtcccggtttccccgaggcattttgtgtacggagactccgtactccatattgtcttgcctttttctttttcgttttcgcattttgcttttgtctcttcatatcgactggggactggtggatccaaaacaaaactacggagtaacaagggcgattatccgttgttaagctatctgtgactgtacggagtactccgtactccatttaatcttcgagccgggagtcccgcaattaaataaaaagctagattcggcaattctaaatccttcgagtgcgtactccgtagataaaaaggaatgccgaaaatgttctgctgatggagatctgttctaagtggaggcggctgtagtgtgggaatcaggtcctcattcgagaatcggagaaacaatagtctctcattaaatgtggggggacattttagttcctttttcttttcctttctgtcttttctctggtcaaaaagtactccggagtcccgccgttgtaaaatgcagctgtagtaactagcaccgtgcctgatcgacagtaagttgacagagaaggtgggcctggcagatcgaagacactaaaagcgttggactgacttcaatactgactcgagtatctccatttggctagaagcttcgtccaggagctgcatcacccccaatttgacttacagcaccagtgcggatatcgaaatataggggtaagggggttgcatgtagattgcaactctatcaaacgaaaatgatacatagtacctacctaaatgataatcccgaagcatatttcaaggccccaaagctctggccacatttaacccataattaaatgtctgggcagtgcacgagcatttaatctccatgtgggtgagatataagggctaagacaacgctagtggaccaccacctggcggccctgaggctcctaagggggtttttcgggggggttttgggggtttttttgtctcgcaacgtccctacaatggtatctcatgcatcaagcttggtctaggcggatctaaataatatctctgccaggttgttatacggactaagtccgccatagatcctggtagaagttaaagtccccactaaatcttttgccactattcccgatttagtatcatttagagagcaacaaggttccaagggagagcactgactgttagtgagatcagcaggcagaaaaaagtggttctctggtggactcgctggagatcatatggcgttgtgatttgcaaggtgcgtgcgccgaatatgaaaccggtgcattagtatacgacgttcagccctgttgtcttggtcaaattgaatagcaatagagttttattagatgttcctgatcttcgttgaatagggggggctacataggatagtgatgttggcagtgtaacttgacacctactttgtataccaagacccatatgtggctccaatgaaataagttttgatatagagcaaagatcttctacatcagcccatactatatccacaatttcatattccgtatttccataccctactcttctgaagctcagaataccacgttgtacggagtacatatcgcattagatacatgaaccggttgcagatcacgctttagcttctagtctggaggcgctaaaagaaaattgtaggagtaattaaaacgaatgaaatcagtcgtcacatttttaattcgtaaattgtcgcttttatagccaaatccatgttttttcctttttgcttcttccaaggttcctttttaatctccgcacgtcccggtcactgacgtcccccaccaacttcatctctcctctccaagctttctttgataataagaatgacgactcggtattgttgaattggatggaattaagaggattcaagggggagtttgaatgggttttgtgatccgacaatgacgcattcacagtcgccccagacggccatgtcgggctttctggactcaatcaaacaggattcaagctcatcttcgtattccttgtttggaccgaaacagtattccgagagtgttgcgttttggcacgatccctccgcggcaccgacaatggtagtgcccccttcgcatacaacctcccagaaacaactctcggaccagaagaagcataagcgcacccggagcggctgcttcacctgccgttcgcgccgggtcaagtgcgacgagaaccgtccagtctgtgaacggtgtaggaaagggaaccgcgattgtgtctatccgtcacccaccgcatcgtcgtccgcatcgtccgtaccctcgaaacctagctcacgctccacagccaagtcgcgtgcaagtcgcccgcactctcacggcagtgattcatcctcgaaggtagactccgagtctctcagccctttgcatcccatcatcgacgaagaggaacccgacagttctgtatccgaatcccgaccgtcgccagcaagcgccacaaccacatcacagccggacctgcgtaagagtcaaagcgcacaatcacttcggaaacatggtgcaagacccgcgtccgacactagttcttacatcaaagaacagagtagttcgccatcaactgggtcaccgcgctttgagtcggtgagtgtgcgctcgggcagccttggacattccacaaccgaactgctcaacaacgcacgcctaccggacgatttgcgattctatttaaatttccaccaggattttatgacccctccgcatttcttcctgcgacataattcttcctatttcatccaccacagccttatcgaacttgcattgcaatatgagcctctcctctacgccctggtgggcttttcggcctaccactattctttacacagccctggggggaagctctacacatttttgaaatactataataaagccttgactctcctacgaaactcgttgagttctggagaggagcacagtgaggctacattatgtactgttctagttctgacaacctttgaggtatattgctcctgcctcccccaagtaccgacatctttctgactttgttgcacttataggaattcattggcgactggatgaatatgatcgatcaccaccaggcggcacatgcattcatgcgaaagctaatcacaccagagtctgccaacatgaacgagctacataccaatatcttcttatggtacgcgcgctttgatgtagtcgtggggattttgtccggtaccgaaacagtcctcggtcgagattggtatcttgcaaaggagcagcatgatgccgagcaagccgctttctatccggatgatccatccaaacaactcgcccttgtggcatcaatcaaccgacgattcggcttggatatggcttccctctatgcgaagttatctcgcggcatgttatcaatggaacaattcgccattcagaacgaccagctgggccaatggctcgagcaggccaagacgattcttaggggattcgatgattacgaatacaagatccaacattacccgcagaagcaacccttgaccgatgatgacgttatcgatccatacgtcccaggtgtcttgtatcgaggtcctttgtgggatttcaactatgcttggatagacattctcgccaccgagacaatgtacaagttccagaccatgcaagtcctgcagcagcctttgcttgaagacttgcaaacattggctaaggagcaatgtcgcataatcgagacgatgattcgctggcctcacaaggaaaacggatattgcatcaactttaaaaacagccttggcatgttgggcatgttcctacccacggagcatcagcataagtatcaaatgtgggcccgacgcacattagcgttgttagagcaacatgggtaagctttcaccggcgtatctgcgtttcagatataaatcagcaagagcaaagctaaccaggagtcatctatgcgaataggtacatcatcgtccctagtttccgcgccgggctagctgccatctggcaagttccagaggttaactattggtggctccctaacgatgaagggtatacaagcattgtccgcgagattcgctccttgaccgacgaacgctcaacacagccacgcgatgagaaacgtgagaccgttcgtgatatgaagtccctcttcgggaagttgaatctggatgaaaccgacgacgacaaaagcccaccatagtgatcttgtgaatgaggtcctttgtatttgcgtcgtctatctccggtccctgagttttcgtggtcttacaagtacagtctccgctattcttggatcagtactgtcctcccgacattttcacatcgaaacgcaaaacatatatgcttactagtcaccctgacaacccgggcaactaatccgacttacgtcctgcgactggatggcacaagaccaagtctcagttgagaacgtttcattggatatcgactcacacctttcatcctttgctctgcttttgccgccctctcacatcctctcgccttctctcgaaatactcttgctatataatgtcttatccacatcctccctcgccttttctacctggtcatactatcatccccccttccccctggaccccgaagacgtctttctcggtcatgacttgatgtacattattatacccaaatccatataggatcattgactgatgccgttcattataccttgtttatacgtccctgctttcaagatttttcctcttttttacataagccgaacagcaagccccgggcctgtaggtgcagagtcctaatgttaggaatgagcacaggttgatggtgatagtagagtatctcctaagaatcaacccgacacccgggcctccacggcacctcctcggctattatgacagtctccaacccacccgccaactctccagcacctccaactccaaaatcatccccctccatatcctccccccacggcaaggcatcaacatcaacctcccatcccagcaaacaccgcagtataaccccagctccagccttactcatgacaacattcatctccttgcatcgctcatcacaaacacactccacacagccctgcggcgtaatacaggaacaagcctcaatgcgcgaaaccgcccgccggagaagcagcccaataaactcaaacgccttactagcaataccagaaccacacgacccacctttcgcatcgtagaaggtaagccgagcaggcctctgtcgcgaaggcggtttaagcttctcctcgaactcaacgggtacattcgcgcgctgcagcggccggccaagctctttcttcgcgactttgcattcagtgcggacgtcaccgggcgaggagacaacgaaggagggcaggagcgagaggacggcgtgctcagcggcgtggatggccgcggctatgtttagccggtgcgattgtaggatgtcgatagcgcgcgttgggacgtctagccacatgcccttggtgagacggtcgattggcgggttatcgacggcaacggcgtcgaggacgcggccgcgcttgtcgactttgaaaaagccgtagactacggcgtggattttgattgcgccgaagaaggcggacgaggcggaggggtcgttgccgaccagacgcattgcttcggtttctatggggtcgatgtcggtgaagtcgcgttgcatggtgttccagtcgacgtggacgcgtacgacgcgtgctaggaaggattcggtgtttagttctttaactaggtaagttgtgccttggtggaggaagatcccgccttcgtaaattgtgaataaggcgcgcgatgcttcgacttcttctatgactatgttgcggttgttggtcgtgtctatgacggcgaagtgttggtcttctgtgtcgcgtattgagacactgcgggatggctgtggacggaatcgtgggtggcagtggtagaagccgagtgaatcttttattaggcgagtcggggccagggcaaggagctgttgcccgaagtagatgctgtcttcttcggggcggataggcatctcaaatgcagcacattgaacgtggccttcgaggatgagctcgttggatagatctatctgcagctcacagttcggtcgcgtgaagatttcatctggattcttcatgtagtgttggtcagttgggtatctatccccgactaggacggatagggagtccttattgcgtcgtccagcgcggccgctttgttggcgtaaattggagatcgagtatgggaagcccatggtgatgactgcatccagggagccaatatcaacgcccaattctagagcgttggtagccacgattcccatcaatttcccctcgaacatctccttttcgatttggcgtcgatcttgagggctatagccgcctcggtagcccatcactagcttgccaatctctgttcgttcgagtctaccaaattcggcgtgcacgccttgtaagagaacttcacatagctttctgattcgacagaaggcaatgactctcacgcccctaaggatcagctggcaaaatagcctcgcagtctcagtgacagtgtcggcgcgcccagaggtaggatctttggggtctttgaatggcgtattccagcaaacaaactccttacggccagagggagatccatcgaaatcgatgagtttcacatcctgcaccccaaagatagacttcatgtgatcctccgggttcgcaacagtagcagagcaagatatgaacttgacatgacgattaccaaccgcagcacatatcctgcgaagacggcgcatgataaaagcgacatgagatccaaataagccgttgtagacgtgtagttcgtcgacaacgacaaacttcagattcttcaaaaaggtgcgccaggaactctcctgtggcaagattgtaatatgaagcatgtcaggattggtgaaaattatgcgtgcctcgtcacgaattaagttccggctccccattggcgtgtccccgtcaaaggtttcaaccattgtgtgttgcagaccgctcatatactgaagtagatccatcatgctgcggcgctgatcttgtgccagagctttagtggggaatatatacatccccctgctctccggatctttttctagttcgtgcagcatggggacttggtagatgagggactttccggagctcgttgacgtcgacacaatcacattgtggccctcatacaggtggttaattgcctctgtttggtgagcatacatttgggtaattccctttgtgttatacagagcattgacaaggtcctgcgagagctggaatgtcaaatctccgtagacagcagactgggcttcgaacacccgatgaccttccggcacaatttgtgcatgatacaaatccatctcccgaatttctgcaattatttcctcgatggactttcgctccttgggaattgttgctggcggcttctctgcaagaggagtgggcaggaaagcattcttcttttcttcaagagaattcactggatcgagattcatgtcctcgcaatgaatcaaaaacgcattcaaagcgtctgaaaactttgaatttcgtttttcaatcaaagccagcatctgtttttggctgtagacgggcattttcagatcatcgtctctcatttgacgcataggtttcataggttccccggttttcgggttcagaacttcccccttcagatcgccgtccataaactcaaatagcagaacttgctttgtgtcgtctgtatagtgaagatcactgcttctggcatcttcaactctgtccatatctgccgaaaatgccagggtacgcttgtgtaacccatactgagtaatctcttcatctccaacggtcattacttccagcttggcttcgtccacatattcgaaaaggaccgctccgggaattatgaccttcacacgtgcgacatcatcaaccgtgagttctcgcccctgaccaagttgagcttgtactgctttttttatgttctcgaatgtggtggcaaagtgctttcgcgtggagcaaaacgtgtacacgagattcaaggcgcgatgggtttgcgagaggcgcttaaaggcgtctggcaatggcgtagatggagttcgtttcgagggcttcgaggtaactttcttccctttacccgtctttttggcggctgtagttttgatagatccacctgtctgtacatcagattcattggggggaggatcgaccgtggtcgagggtgtctgatcggcagggtcttggggggacgcgttcaagggtaagggcacatcggactcaaggccgcgatcgctttcatgacttcgttttcgctttaatgatgagacttccagtggtattgagaaggagcccgccatgtcgaagctccatagtgctttatgttggagctgaagtcgataaaagtcctggttgacgggaaacgcgaaatcacgtgcattgagatcgcctgaaatggcagccgttccacggttctaaaattggccaatgcttaggtctacctcgctcgtttttatatcaccactacccaatccctctgactagcggtgaaatccaaaataattatttttcttgtatggtcctaaggacaaacccgccctcaggctagccctgcctcaatcacgctttctgcaacgcccggataggtgtagatattgaccactttcaatccaacttgggccaggatatctctccaatcagcctccgttctttccctcacagcaaaatgtgccaacatcatcatatccatattggtcgcagcaagtgtaggcttttcttcgttaatcacaatctcgttgaacaagacccgtgaataatccttcttcaaagcaggcacaagattcttcaggatcttgatgccatcttcatcgctccaatcgtggagaatagaatgaagagagtatgcacgtgcacccttgataggctgcggcgtaaaaaagtcgtgagcttgcacttcaaaagctcgcgccataccatcagctctcacacctgcaatgacaggctctcgatcctggagcacaatcctacccgagcaagggctataatgcgcagcaaaggtagccacatcatggccctttccgccaccaatatcgacgaggagaacgtcgctaatagaagcatcgaaacccgtggttaatcgctcagccacggggtagaagtcatgccaatctggcttacccgcacggtacgcgctcataaaggagtcgaaatgctcttggtgtggtggtgtttcaagaagccatttaaagaacggaaggttggttttgtgcgcctcttgaaacggaccgtcagttccacccagagtaggggaactatattcggatttcttgaagtattccgggaacccgttaaatgaagggcgtgccacatcgtagcagaaactgatgctggattggtagttctccgctgcgagactgttgctcagctttgtggcatagaaggctccgtcatggaatttcacgaggttcattgctactagatgtcttgttaggcgttgtaggagaatattgtcgatctgagtcttctgggaaaaggccgatgggctgagccctgtatctcccgcatccttgaggcattggaaaagcttcacatcgacagcgagacggatgatggcgctttgagccggctatcgtaaactccaattagtttggtgaagcaaaataagctcccaacgattttgcagcttctcacctctgcccagaatgtgcgctggatgaactcgcttgggatctccaatgctgtaatcagcgcgcggctttggtcaatcagactttctcttgagcccgcttcgttcttttcaaatgctgcgcgtgaattggcaatcccatctaggattgaggagacagatgggaaggccatgatgatatttggcgttgacagtaagtcaaaagaacagacgctgtctgttaaagaggaaataatgcatgttagaagacctacttgcccctcttcctcccctattcttgtatttttctcccagaaatagtctaaggctagctgctagtacgtggtagacgacacggatgaacttataagccattattcacccgtggaccctccaagtgcggcctttgaccaaccaggtcttagacttctatgggaaatgatatagccattttactactagatcacaacaaaaaccaaggcacggagtacctacctggttatagcgtagtggggccatatctatccttattccaaattgacaacttaccttggcgttggcgggtgctcgttcggagttgaaccgagatagtaataacaggccgttctcacatcactagatccagaaagtatgttgggagctaatcacccatgttaagtcttttcaaaaaactagcctggcgcgaactggcgcctgaaagaatctcacctcctaattatgtacaatcggaacataagctaagaggcgctatgagctaaatcgtttagctcgccgaggggataggtttcacctatacattcagttagggaaatgatctacgtactccgtccggagcaaacagttgagccgtgcctaaagtacttaaaaattagaatttcaggagattatgcctcttagttcacagtaaagatagtccctattacgttcaatccaccatttccctattcctcaacacgtatcaaataaaatctttatgactataaatatgatataaatatgtccaacagaggcagagataataggggtacgcacggtcgccttaacccgccatggagtacggagtactccgtagtagcctcaatggccaacaacaatccactttttacaacttgaataccttcaaggctatgaagtatttgtagaagaaatgtctatatctcctcaagactgttccggatcaccaacagtgatgagtagaatccaagtataagcttcctgccaaaatcatctgtttagtgacgttgatgttgagtaaacttggcacatttgaacagagttttttcctaaagcttgcctccctatttttatttgattcgtcatcgtcgctcatgggcccataagtatattttacatgggtgttcaagatatgaacaagcgcaattatggaatactagtcgatacaccataccggctagtactacaatataggcataggtcaaaaattattcgtgactttcaagattcaaattatttgcacgagtttgtttcccgcacataattgtttcaaactgcctttcagagaaacgcgctgtttgagggtttcttctcgatcgattcctatgcaacgaatgtataatggactaaccctttgaccatggcctccttcaacacaaatgttgatcatagtgaaaaccgagcaacgaatatgaatgtcattggttggttcttcaccggcgttgcaatcgcagcagtttccttgaagctatttgcccgaattggtagcaagcggtttggctgggatgatttttttatttttttatcgatggtatggagcactcccagatctccctagacaagactgacattgtggaaattgttatgtaggctctcagcatcattgccatggcactcgtctcttattcggccactcttggtctaggtcggcacactgcaactgtagttgctgaatatggcattgagagatacgaaaaatcagcctactggcagattattggatttcctttcaacattggtatgtttacttactcaatagagaaaatcaagtactaaaaccgagacctataggagcgtttagcttccccaatatctcgattgccatcctgatcgttcagctgcttgaccccaacccacttcgtgcaaatctcttatacgccatggttattttccaggtcatattggccatgatatacgttttcatcgtcttttttcaatgcaaacccaccgaaaaaatgtggaactcttccattgagggcacatgttggagctcggatattttcaacggcttttcgtatttggtcagcgcatatacaactatgacggatattgttttggctattgtaccaatttctgcattctggaaactgcaaatgccgttttcgacaagactgagcgtctgcattatgatgggattgacactgctttccgcggttgttacgattattaaagcaacatatttgaacttatttaccgaccacactgatcctcgttagtggaccaccctagttttgttatctagctaacagctaacatctggtagttttcaaggtggtgccgttggttctttggggagtgtaagtattacccactgtttaccaagcctgtgctaacttgcagcttaggattgagcaaaatgttgtcattgtcgccgcttgtatcccgacactccgccctttattccgcaaggcattcgagtctaccactggatcctctggtgaagccacttcacaaagagaaacgcgctgcggcttcaaactcgcatacagttccatacaatctctctcgaagcggacattatctgtgacggaattacctcttaaggacaggcagcaatcctatgatatcgagagtagtagtagccaatttggcatatggcggacgagagaggtaatggtggaaagtgacgacgataggtctttcgaacgcggcgttggaaggacagataattcatttaggggattgtcacaggaaccttccccccttagctaattcgatcccactactccgtactagtatatgcattctagtttacatggtgaaacaaaacatgcattttgatgagaaaaattcgtataatctacctgattactataggatttagcccttgatggtaaagcggttgataaagcagttgatgataggacaaaagttgacttaatttgttagtggtttacatacaattataatctcccagttgatttatcgataactccaacatgttcgcggggacaggctcaaggaatgatccgatcgatttgaatccaagtcctaaaaccagtcaatcgtgcagtgagaattcgaggccgtcgacaacagtatattcttccacaaaaaccggaataacttcgctagataacgaatctggtagaacacggtatgatgcgtcttcttcttctacagataagagaaatgttgaagttgagtatttaaccttacttccggtcaacagctctatcattgatagtctcttagcttcttttgaagttgaaaatagcccgatatcatcttcgcgtccagtcgatcatattgttaattagcccattgacattaactccattaccacattaggagtcggatcgactggtacctctgggctcaccttctttatcatattcagcgtcgacttcaccctcacttacttcgactgttgtatctataaggatcgaaattccgatcccatctcgaccgccctatgatccgtcagcatgtttatatctagtgtgtattcgacaatgggtaaggatgccactagatgatactgattgtatatgattttgaacctttatatctgatctagaaccttttattctatcagactggtcatatggcgaagagatagtagttatcgcagtttctatcgaagaatatcatctagtcgacggcctggaattttcactgcataattgactggtttcaggacttgggtccaaatcgatcggatcattcttcgaacctattcccgcgaatatcttagagttattaataggatagctaattggtatatgaaccataaaacatagataaactgggagaatatcgaaaagaattaaatagtaaagtagtatgaaagtaattttatatgcattgaaatgtatagaaatcattctgacgtgaattccggcatgttccatcaagtgagtaaacatttttgatggggtggccgccttcgcggaaattgcaggcagaaagctaaccgccattatatatagcatgttgattgggtatgagttatagatagtcttgtctaagcctggtttacagatttatgttatggatgttatggacttatggaatcttatggaattatggattatcttatggattgtaggtacctgatatggggagtttgacataaaagcggtgtaaaaattgaaaggcggtataggcctcgataagcagaatcaggtgccgaggcagaatgtatgcccagttaggaaggcggtatttgaatttcagtcagggcccttattttactacactcatctttatcatcacccaaccaactacaaatctattcttttctgccacaagaaccaaatatgattcggcatccacgctcggcccagcctgaccccataaccgtcgaaatcggccaggtacttgcacccctggctgtctttccatggggaccgcttgcaatgcactacttgggtgttcctattgtaataggtgttagtacggttatcacttattggtattctagcgtctactaatcaagtcttataggttgctatgatcgccgttcgtgatgaggactatcagacagcatgccagaagctaaagcacctgggattctatgaaataattcctgaccgcacgattctccccgagatattggcagcgatcccagatccagatcaagcaattgaagaggttgcgaaggagtatcaacgtctggataactcaactattacgttcgaatatccacccaatcacgacctttctgggagtctacagttgactttggccccaaactccttcacgaatcttcaggtaccggatatgaccggcaacgtgcagcaagaccctgtctctaccacgggctacgacatctacggcaatatatgtcacccacttgaagaggcgttggttgaaagttacgtcaggagcgttattgacgatgagaatgatcagaatgagttttctggttggggagatagactaagcacctgggtggctatgatgtgtggatatcttgaggtcaataacgatatcctcgatagatgctcggatgagcgagcagtggaatggtttagtgtgacctacggtcggatacacgaggaaaggttcggtcccttggatagacgtgtctcaaagcgactaggttccggaagggaaatgccagtggatatgaggggcaacctgttgcccacgtaaagtcgggcattttctgtatcatacggtgtggcgaagcagatcaaagcaggtcatttacattttatcaaagtctacacaattagaaagcgttcatgaaatcgtctgttgatgcgaataggccgagataactatagtccggacccaagacctccatatcaaaatgaaatgagagggcctaaaagcaggcaagtagcgctaatgtttgacgtaatgaaaagcgaagaagaagaaagaagaagctcaagtgcaaccgcaaaaaccccatgtctagcaataactgaagtatgtggccgaaatcaggaagggagacattctctagagaaaatgaatattagtaaaattgactttataggaaatgaaaataggttgagtcttaccaattaccgaagactgaattgcatttgatgcttcggcgaaggctgctgtggagacgggggcgttccctcagaaggcttgctaaggcaagttgcaattgcgcgtcttggtcaaaattgagttctggtctgttgggtacacaatatctaaccaaccgcgcaatgtcttcgatatcggtcaaatgctttggaccctgtcgctggtactgggataagatcttctctcgcgtaagccattcagctccgaagatcttcacgggatatccgttgatagtcctggtcacacgtgtcgccgtctgaatattatactgcggcctttgtggtcagctagcgtgatcgaaaacctccaactcgataagctgaatggtgccgcttggggaacgtagtctgaatgccgggatcacatgtccgaattggttgaccggtccaaaatcagcagggaaagcgttcagcaatcgctgtgtaagaagatctgcagttatgtagcgctggtcgacatgaatgactaaatccacatcttctgtccgccggctgggatgtggtgccatgaaacataccgcggcacctcccatgagcgcgtagtcaatttgcaatagatctagacattgggcaatgcgggagacgacggtttctaactggggtagaagtaggccacgcattcttcaatcgttctctaatatcacgatggtcagatttggagtgggagagtgagtgtgatttctcgtacctctgcgtgtgcggagagtcgctgtgggactagaggttttatgagtaaagaaactgatgcaatgagatgtgcgcagagaaaaggtaagagaaaggaagagcagatgagcaaaaaagcaggatatgagaagagcaggggagcggaggagcggaggagcgaagaaactgatctaatgagatgtgcacagagaggaaggtgaagggagatgaagagagagggagagaggaagagcagaagagcaagcccggtgaggagcaggcaggaaggctgcctcaacaactcctcgtctaggtagcgcaacccttccacatatgattttagagaggtcatagtaagagggatgtcaagaatacagcggggctctgaagcaaagtaaattacctccctctcacctctgttatctctcacttcagttacctcttatacttgagaataagtttctaggtatggatactatgatttctatcattctacttgtctaatcaacatgaatctactatcaacttacggatgttgacttctcaactataagagagacagcacgtagctgggtctgtgatattcctgaaggaatttcatttgaggccaaaggatattcaaggtttcttccgatccacttcggcccgcttagaggaactaggtcccggcgctatttcatctactaaagtggggtctaaatcctatgatgtcgagagtagtagtagccagtcaggcatatggcggacgagagaggtaataatggagaggaacgacgatagatgcgttggaaggtcacaattcatttgagatccaaactttctagcgaagactacagagtaaaccacctagaaaaatggagataattaaatttgtatagcccaaaagcttcatgttcatggggtcatcgggcctggttattccgtgctggctgtaaatcgatgcataaaagcggttaaattcaggccaaatttcaggcattaaagccctaacgtaattcacaagcgagtgacgcacacaagcgagtgacgcaccccacccaaaacgcgtctatggtttagcacttagttaattcaaccacccaccatgccaccaattcgctctcgaagctctcgaaattcaatagagcaagaaggcaggatcttgttagctatccaggctattaagggtcaagaaatcagttctattcgtgaggcagcacgccgattcgatgtgcctgaaactacgttacgtcgctgtctccgcggtgttacaaaccgcgcgacttctcgcgctaactcacataaattgacagaaattgaagaggaatctcttcagaaatggattctctctatggattctcgcggttcagccccccggccctcttcggtacgagaaatggcgaatattctcctcgaacactgtggaataaccccagtcctttcagttggcgaaaactaggttataaactttattaaacggtaccctaccctttcctcccgattcttaagacgttataattacaagcgcgcgaaatataaagacctaaggattattagaaagtggtttaatctagtttaaaaaaccattcttcagtatggaatcgatccggacgacgtttataacttcgacgagacaggttttgctataggattaactgtaatagctaaggttataactagaagtaaatactacggtcggagatcacttttataacctagaaatcgcgagtaggtaactgtaattgaatatataaatacagcggggtaggccctccctctgtatattatttttaaaggcaaggtcttctttaaatcatggtttaaagaccttcctagcgactggcgctttaaagttagtctaaataggtagatattagataaaataggcctccgttagctataaaagctctttattctaactacttcttcttatataaaaggggtatatcggcttttagtacttaacggccataaaagctatttaataccaaagttcaataaaatttgcaagtaaaacaacattatactaatttatatactaccgcattccttttaccttttataaccacttaatatcggctgttttatagtattaaagcgggtatacagtcggctagttaaatcaaaaatataggtcgggatcaactatattaataaacttaacttcctcaaagtatacccccttatataaaataaagcttttaaactagagacaattaaaaatagcttcttagcagccggtttagtaccgtttttacccaatcgggtccttttaaagctaaatattcgtcttcgaataccaactccccccccaagccgggatagcgattaggaccctaaaataccttcaaactacattcaattataaaagcaagctttatcaattaaagcattgcttcgtataagatcaagaagccctccgagcccgctcaattcggctattaaccaggttttaaaagcctgccagattactatgcaatctaccgtacttcttgagaaagaagtaagcgatttacgggctactaacgagaagcagaagcaaaagtgtactagatcccagaggcagatacattccgaagaaggcctctccgttcaggaagcttctcaattgattactgcgccggtggaagtagctgaagcacccccccgcgctcagcgaagaaggccttcgctacctttacagccaagaactagggctttaccaacgtgcgggctatgtaaaactcagggccataggagagatacatgtccaaatagatgatgattttagtttattcaatttaatggcgttttggttgggataaatacattcaaaattaataggttgggtagggtgcgtcactcgcttgtgtgcgtcactcgcttgtgaattacgttagttaatacggtgacaacgacccctctcgctatgttatattgtactttacgactagaaatatattccagctacttgtttagagcgtaatatttgcaattcgtcatcaggtaaacataattcaggtttcgcggcatcgggaaacctgcaccaggcatatctcatcagtatatcggtccgagtctgctgtctgggacaactccaagctggagggcgacttggccccttttgtgctatctccaagttgcgagaatccaggctctttggtatggcgtggagtactgctataccttgaacgaggttcttttgaggccgaactaccgacgagtttccggcctaggattctggaaagcaaaggccaaatggaaggaaggcaggcagcaattatgataacgccactttcgagaattgtccaaatcccaagcttgacagaagtccctatcgatattagctgaggttgagcgtggggatcttgcatgacatacaggtcgggtctgtaagagcactttcttggaaaaagatagtcatgcgaagaatactcgcgacggttcccctatcagcagtgtcagaatccctccaagcagaaggtcattgtgaaaactcacaaacttcccagaaggaagacgccggttaaggctactttctggccaattcgggtgtgaagtttccagacatacggcagcggcatcaccaagatcaaaacatcggtcatgatattaggaagcgaaacataacggtagaaagcctcttggttgaagcatgagcctccagcaattgttctatcccatgtgtatgcgattggcgaacattgaaaaatcgccgcgagcaaaactccaagtccatgacctagcacaattgcacccacaatataggcaaatattcgaaacatgcggacaggaaataggcgcacgtagaagaggaggatcgaaaccttagcgggcgctatagtgaaaggaaaatcgaggatttggtttgcgtagagaccctggataaaaccgattagacattgctgagagcttctcaagtcaaattatgacaaactttttgtaagataaccaattttgaaggagttcgcgcgacatattcgaggtgataaccgactcctccccgcttgaccactgtacatcgtgatatcagtatccgatcgccaatatactgtaggaaggtgcgtacaatagatatagagtgccgattgtgctaaactagcaatctgtttttcttgttagcattgtgcaggttcacgaggtttgaatataggtggcgattcataccaacgctgggatcattaaatagtcatcgattccgtttgctactcgctgtatatgcctagtgtaaaaacgggccccgacgataatgatttgaatggcagcaatagcaattgagacaccaatgagttgttgtccgcaatatgcgacagtgccagtactctctgccattgttgatcaagcgttcaacatgtcgcttgcgagtattcaaggcattgcttgaccaattggctaggtcgaatttttttcacgagaaaacgtagaactcacacttaccccagagcaaaatgaatcggccaatataagttgccttgcttactttttggtcatatacttggcctcgagttagtgggttgattagggatttatattaaggtgtcatcataatgattggggccaaaacaggttacgtattgatttttagaactgtaacaaattaacaatcctgctaagcgagatgcgctctttgaattttgggagagtgatatatgctttgccctttgactctaccatcacaaatcttgaaagcacttttgatttcacaatggcattcgcatcggacggcgtgttgaggagaacccatcgcgctatcgagagcctagaacacggctacccaacacttccactatgtttaggtttcaactattcctatcacatcgttaattatgctattgtgctccatattgctaacaatgctgcttctaagaggccgagcactcgaaatcctttacaacatatcttccaactccaccgtgaaacctgattgaaacctgccgaaggaaattcaagcgtaactcgacaataaccagactggctagttagagcctctttatcagagttttctatagacggcagtatattgtaggcaataaatgcaaattcaatttctcgtataaagcaatcggggcataaaataatcccagatctcggccacactagttcatcgagtggacctgcttgcttgagcacggttcacacggttcacacaacgggatctcaaggcccatatttgtcggagagcccgccccgtgtacggagtatgtagcgtttatgtactccacgggataacttgaatgctctaagatatcctttcgggaaattctagaatttctacgacaccgcaagaaaatccatcatgacccaggatatggacacatctctctcggcacagatcgctgctttggccgatagtgcgcagactcgaggcctcgatgagcaagcacgttcagaagcactcaatgctgctcggcgtttggtagctgctttggagtcacccgttgagagaattattcaggatgtagtgatggtatgttttatgtccgagacttcaattcacagcccctcattgcagtcttacgatgtggcttttgaattaactaattctgaatttacagcactccccagctttgatggctattcgtatgggtgttcagctgggaatttttactcagatcagccaaaagccagaaggcggcgcttcatctccggagatcgcagagaactccggtgcaagcttggttcttgttggtaagattggcctatccgaccgtcgtttatcaatgaattccgccattcccctacattaacataaaattatcatattcagcatgaaattatacttgcaatagactaaatatctaatataaattctctcaagaccagattactcggcttctcgccgcgacgggatatatcaagcaggatggagtacaacacttcaagccctcgcctcttaccatggtgatggcagacccagtcatggaagcaaccactcgagcctggtcagtgcaatttttgatttttttcccatctatgctcctaatcggctgaagcttttattgacaacacgtagctttgagatcggcaacctttgcacttccaaagcaccagagttcttccgcaaaaacaataatcaattccctagttctgccaaggatacgcctttccaactaggatttaacaccgatatgaactatttcgagtggctgggccacaatcccgatctggccaaggatttccagcaatggatgacactaaagcagaagactacccttaactgggttgactggtttgacattcagcgatcaatcattgatggctccagtggcaagcctgaggatgtccttctcgttgatgttggaggtggcgaagggcattatctacggcaattccgcgagaaattccccgagacacctggccgtttgatcctacaagatctgccgcaggtagtttcgaccgttgagaatctcccggaaggtatagaattgacgccgcacgactttttcactcctcaaacagtcaagggtgtgtaatgctagaattgcatagttatcgtgcttgtgctaatgattgtcaaataggcgcgcgggcatacttcatgcactggattcttcatgactggtcggacgagcactgccgatccatcctggctaatattgtcgatgctatggagcctggttactctcgtctgatcatccacgagtccatcctcccggacctccactgcgatctgccgtctgcttgtctgagcgttatgatgatggtccaggttgctgcgtttgagcgatctgagaaacaatggagggatcttcttgcgtctgtgggactgacgaaagtcaccttctaccagcctcctggaagtggcgaaggtattgttgaggcttttaaatgatttagggggtatgaggcctggtattggctcaaaccggggtgacaggggtgacagtcaggagtaggtttcctctcacttgactgatttaggtataagggagtgggtgagggggaaaagagaacgtagggacaaactgagtgagaaatgaaggcgaggagtgagccaatagctgcagcgctctcaccctaaagtgatcttatacttttattaatccctgggagtgctagaagacttgatccaggatataaatactttaaaatagatggccataagtggcgccattttcagccgcctatctgccacttgctgtcgctcaccgtgccccctgcactcacgcacggtgaatttaacacgccgcagtagcttcgtatacacccgtcgccagattatctctcgtcacgagctggagaagagcatcaaagacgctcaacatcacccaacaaccactggacatgacgataagacattcggccttgatcctgggattgtcgatgacccgcttggaaggtttccgcaaacatcagaccacgttcatagtgctggactcccatcaacccctgtggaccatccaaaccgccataatcgtcttgggcagtgaagaccggagcgtattgcaagtcggacgtgtcaatagtaatgggagtggtgggacgagtctggaaacccagctcgccattccaggtcatgttctggatcgccagcaacgttccattcgtgatgatcagatagtcccaatctccattcgagatcaagacccgattagtcgcctcgatcagtcgcggcaggacatgctctgtgggattcgcagactcgtcgtactgttgctcgggccccgggttgacgcccacaaagacgctttcgatgctacagagctcccagtcgatatcgagaggaacatgcagagcgctcttcacatccgtgcggttgaaataggttgagggaccgggttgataggcaaggtctgtggggaagcccaggacatcccataagagtggacatgtctggctgaccttgtaaggactccaacatgggttcggattataagcttcgaaataaatcatgttgtagatgtcgcactcggagtagttcatttgtttggagggttgcactccagaggccggataggtgaaatactcctcgaagtattccttgtaaccgcattcttcgtaggtagcttgcagctcccccatgtacgattggttaaagttgaagagctcggcatgttgttcaacgaaggggtaggaggggagttcggcctggatataatcccactggccgatgcacgcatcatacatcagggctcctagtatgggatgagtatgtgcgaccgatataatgcagattcagggggattctcaagtcttaccgctgaggttgaagtactcggtatcattcttgtcgagcatggcggcggatatgaagggcacgtaccggcccgcataactctcaccagttaagaagattcgaaagttcttaataccgtatgttttttggaactcttggaaaaagttgacgaaatcggcagcgatgtcctcctcgtcggttgcagtcggcgtgccgtttgagaacccaactccaaccggttggtcgaccctaaacacctgtcagcttatcaagtacatcctcgggtctgcacacaaagaaaccattttactaatgacgtaccataacatattggttaaattaacccatgagtactcattgatgacaggttcgtaggtaccaggttgccaggtgaagcgcccgttctcctgcagaaacccctgcattgaactacatcccggtccaccattcagccaaattgtaaggtcgtcgcttggttccccgatcttcggctggaatatgtagaacaaggaggcatcgtcacggacagggataaaccccgagtacatctctcccaaatcgaaattaacgtccggtagactctccacgacatgggctgtggaaacattatttgtcagccgtggttgaaggaatgggtaaaggattggagtaaagcatacatttagtctcgttagttaaaaatcgatagtttgagggatcaattggttcagactgctgggtaggacgcgtagaagggcctcgagtcggctgtcgtgcttcgttgccattgatcagcagtgcgatcgccagaactgctgagatcgatcgaccgaacatccttgcagttcccttatacggagtagagatcgagtgttcgcaatgcaaaatgtcaatcggcccacttgggtagagctaaggagaggctatgtactcttatacccctatatgccggcttctctcgtgtttgcatgacaaacacgctttggtatttcttccgagatccttcgatatgagatccacttttcaagggatcagccgtgctaataaaattagcggctgttgatcacgaacagaccctcttttgcccacttctctccactttttgcattttaggtaagtgtcgtccggaaatgagattcttaatgggtattagcatcaaacgctagaataccaatgattcattgtggtatatactaagtctcgtagcacatctagttctaatgtattaggaacattgttatgtattcgagtgtacatatactacagcataagccaattaccatattgtattagataaattgttaataaccctaagcttaaacaagcaatcaagcaaaagccaattcgcgtataaatggattaattaccttttatgcaatattattggtcaatgaaagcggttcccctgttccttctccatatctgacccacctgtgttttgaacccggggattaacttacggggtttaacttacagatccccggcagttctttcccaatttaccaagggaatgagtctactatgtaactactaaagcgatataggtgcacgaaatcagtagttgggaatgacattggtacctagacagctacaccactatatagctacagtacttcttccttgtatccgcggagatggctacaaacaggcgaccgggggccggcggaagcgcagtgccttgcatatcgaataatactaccgtatgtattagaatacaacagtctatacgaagagatctaatcagattgtttagcttataattagcatagtacttggctaattcggtttttgttacatattgaaagcaagttaatgtttcgaaagcgttctcacctcgcaatggatacatcgtaggaccgagaaataacttctaacttagcatctagattgcgtaccatgaagttgtataatacagaagagaatattcgagcaactccacataacacgaaacagaggttcaaccgtaggacgaagcttaattagggaatattcggtagatctctgcgctactggaaatgaattccacacgcgtacgcaggacacagactattgtatggaccttgggggaacaacttggaataggtccactattattaatgctttgctaatcgattccaagccttggaaattccaaagtagacgtttaatatttattggtaccttaaaacctgattatgatattgatgcggcatatacggagtacggagtacggaatgctaattttccatctgggcatctttaagcgggccgttgtcggatctgataaaaagagaggggcaaccatgcttcatatagtgcacaaagactttagcatagtactccgtacatatcatcgatgttcagaagccccttttttcataactaatttaaaacccgactgattgcattctatgccctactgccactgataccagttccatggtataccttagcagtttcgacactcattttgcagtatctttaataggggcgagctgaggagtgtattagggttatctttgagctgaatccacgtgactgaatgtcagctttctatccatgattcatacagagtgtccgtgctttgtacaacatacttggattcagcatattctccgtatagatgaaacttgcggccccggagttgcccgcggccgaggtttcggggcttcgggtcggagcaagggtatttaccagatataaagtgacaagtggtagtagaaggcgaggtgcgttatagagcttatggttatcacggggtctgaagatgcttaattaacttgttcattataatgagagtgctgctctggtataaggattaaagaggtgccaagatataggcaaagaaatttgcaaagtctaagtgtgtgtattaaagatcgctaacaaccggtaaagaaaattctgcactgcctccacgagggtggttatttttcattttttatgggtcttctttatttacatggaattatatttcgatgactacccaggtgaactcagcattcaagacatcaaacagttcctgtcagcttttcgctaagttgtgttgattcattagcgttataattaatttcttcaaatccgagaaagaagagaagacttaatcaaagtaataggccgataaccttgttgtcttcttcaacagacaagaaccgaatggtcataacccaggtatattcaagactaaatcgggcgttggagactaagagcaatctgcatgtttgttcttctccgagccaccatcatgatgttcctgagttgtataattgatttactacaacataagctgtgcgtggaaattcagctctaaagcgattagtttccaacaggcagtgaagccgaggaagccacgtaacccgattcttcatagtgagctctatcaccctcctgttctccaccttttattcgcccttgttagttcttctctccattgctgctctaaaacaagagggggccaaatgagagtcgaatgatagtagatcggagagctcttgcccaggatcagcaacggctgtccgaaacgaaatttcacctgttggcttagggagagaatgagacgaaggcgggttagcaatttcggtcctgggtgggagctgtgcaaccattatgccagtgctagtgctacatggtggcaagcgggaagcgttgtatacttgctgtcgaaacattatgaagtcattcgttttgggcatggttcataatttctgtaccttgggcgaaagatctgagtttcctccaaaaaggaattcgcaaacacaaatcacctaggtacgtcctacggcttggatctgaacgatatcccgggaaccatcttcgatcttgaggctgatatctcgtttgctcgctcatagcaactcaacttttgatggttgtgagtaagcgggtgaagagaagcataactagttaaaataaagtgagggccaagtgaaagtgtttgaggtcacgtggcctctcgggcatgcttgaattggggactgctttcgccgtgaccgccttcgggcaggacattcatagaaaaagacatcttaaggaatagccgtctgatcatccctccctgaccccatatctcggtaagacggctacaagcacctaccggaggatctgcgtcttcattttgtttccatcggatttgagagaacttccatctcggacttcgctgagacttgaggacatacagattcctcctgcccgttagaatagttccaagtagagcattcaaatgtctacaagagtgctgaccctactggtaggtgtgggtcagacttcggtctgtcagatttggtgaccgacgctgggatttcctgaccctaggagagaccctgatcctctgtgaaagaggaactcattgccaaacagcgcgatatcatctttgaatggacagataatcatcgtctcgtccaacgagtccctcgaaaccgctgcagctggaagacatctggcacctagctgctcagcattgtgctcggcggatattgcccatctggcagatactgcatacttcagcgaggtacggcaggagctccatgggaccgtgattgccgattcgagcgcgccttcccctcagtcaacactctcaacaagtacgaccggtagtttctcttctcctcctcaggcaaatcgatattttccagagcacacgcattcttcacgcagtactcttcggatgtctccaatacaactacatcgcaggcaaaacaaccccagctttagtggttgccgaccagccagcctgttgcatagtcgatcgctgtgatgatctaacgattgccgttcagagtgggcggcatccgcctgttcggacgatggggaattgatctcatcggccgcttaccgaccactccgaacggcaatcgttagatcaccacggcgatcgactatgcaacaggctggccggtcgcccgtgcagtcccggacgcaacagaagaggttctcacggaatttctttaccgcgatgtctacgcacattacagagccttcaacgaattgctctccgataatggcccgaacctcttgtccggcgcagtacgacactttgcgggcttgctgaaagctcgccaccgtacaaccactccatataatccccgcactaatgggaaagtagaaaatttcaatggtttaatcggtcgcacgctcacgaaataccttatgggggaacccacgcgcgtgtgggacgagttcctcacgaaagcagcgcaatttatttcaatatttgagtgtaagaaggaaggagcccgggaagaatggtatagcgatttcgccaagcgagctcaaactgaggacgtgggtcatcctgttgattggctgcggactttatacacgaggatcagtgtgcaatatatggtattcgaaatggaagatctttaggtaactgcagataagatggaaaaagaccgggtggctgcagaacagttgggagaggagaggccaaaagccgttgtcccaccgtctatctttgatgtaccctgggctatgggccgttaaacagtggactagttgatatagtctggctattgatactcgttgagattgtttctgcctcagataggaggacttcgctccctgactgtttgatcttcctagcagttagctcgatacaacccacggttttctttgcctgaggttttataccagtggagcttgaaacccggtagtgagacaggtcaaaatttactgtaggaaaatccgatatggtgcactgaaggtgtattaagaattcactaatctgcagtaataagaagtcagagccgaccccataagagtccgtcttcttcttcttcttttttttttttgagttttcttcatttacaagcgtatcttcatgaataaattccaatgtcacagctcaaatctcctcaatgacatccttcagtacatcgaaaagctcaccggcctgcttctcattaccgagctataggatcattcaatgttagtattataatcatcaaatcagaaaactgagaaaaatcgaggaagataagacttacccggagaagatggctcacaaccttgtcatcttcattgctggcgagatagatatcccgagtggatgggcgaaaacccttgatatcaccaaaaggcatggtcttccaaattgcactgttcatcataacacgcaaggcaccatcggcgcgcatgataacgcggccggatttctttccatcgggctccgtcttgaggttaaccttgaaggtgccggtaccacgctccttccatttcttgtcatcaaagtagtacagcttgcccttggctgtaaactcggtggtctcattttcttcgccggtttcaactttgtcatggggtgagcgactgtccatcttcggggtgctggggggcaaggggggatccataccagtttgtgcgtggaatcgctcgtcggtcttctcggcgacaaaggtgtcatcgggtccgcccgctggttccttgtcactttcttccttgtcgggttgttttgcaccgagggtcttttcactgggctcgccaaaagaaacgggggcattaggagacgcgaaactggtgagtttaccagccgttccaagaaaaccgacgggagcgtttgccgatgcgaaactggtgagattaccagctgttccagagaaactggcaggggcgtttgcagatgcgaaactggtcaatttaccagctgtcccagggaaagcggcgggggcattgggagatgcgaaactggtgagtttaccagagggagcagggaaagcgctgccaaatgcagagaagccggatccgagggcaccgaaaccagcagttgaggcaggaccggttgaagcatcagatggtttatttgcaggcattgcaaagggtgaaggtgaggtagcagcctttccgaatgcactcgtagtgaaagtctgttaggaactagtgttagtggaagacgaagaaaagaaaaacttgcggaagatgaggtagccaactcacctggtccaccttggccttgcgctcctccgaattgtcacgaggtctcttcttctcgggttgtccttcggtgatggatttttcgtctgatgaagttgtctcagtcaagccaggcgtggggtcagtcgcagcgtgggaattctgtgagacgtcatcttcaagttgttctcggctccgtttcttcttgagggtttgtgaagaatcatcctcgtttccgccggcggtcgattcaagattctgtgggaattgagagtggttagaatcaggaagtccaagcgtgggtctagggtaataggggtgcgttggactgtatgggacaggacgcggagagggagagggtgagggtgaacggtagtcaggtagagagggcgagggagaagagtagtcaggcagagagtcttcatctccaattgactcggggttttgagttgtgtgagatggagaatcatcatgtatgtaggattcagatgaagggtgggaagggttctcgagagaagggtgcacaatagagggcgacccaggggaagggtgtccgggggaagggtgtccgggggaaggttgtccgggggaagggtgtccgggggcagggtgtccgggggaagggtgtccaggggcagggtgtccagggaaagggcttccagatgaaggaataggctttgcagaaggaatggtgtcacggatttcggaggattcgccttcagcggatctcgaagtcgaggaagccaaggtgaccgctccagttgtcaccttgataccaacctcaacaggaatggtcaaatggctaacttgctcggatccgccaaatgagaccttgatctcaagctccaagggaaattggatcttggtctcggtgatgaggctcatgatcgggttgtgggacaagggtgtattgcgaaccgcaatgttcgcggatgatgtggccagcacatcgtcactcacatcttgggtagtggcatccttgggtaattcggcgtgattggagttgtcttcactgtcagcggtgttcggagtacactctcgggatcgcttggctgggggtgtgtcgtttgcaccatctgtgttgtcgaggtagcgctttcggtttgcacgtgcagaatcgttgtttccaccaacagcatcgaggttagtctccttgagctgctgtcgcacggggcgttcgccgctatcattgtcggaggggggcgactgcgcggtcactatcaagattgtcagatcacatgaacttcggagaaagccctacggcagaaagggtattgcagatataagtaaaagctgcagaacggagcaaagaccgatcgattaaaacgtacctctgtggtccattttcagttgctccgtttccaaagctttggaggttgtcagcgaaactgcccaagtatgtgggggaggctatgcgcccaagcgctgatcacataccacctgtggagaagttctgctcgctagaagcagaagccatggcgtcacgtcctatagacaagcttgtcaaggatattggtattggattccagatatccggtcgagattgagttgggcggagcttaaaccaggtcacgataactgcagataaccggttcggatcgattgggaccagccgaatcgacgaaggatggaagatttgaagtttgcgaactttgcgaacagaagaacgagaggatggaagggtggaaaggtgagagaagaaggaaaatctagcttgccggttcttataagttgaccgccgggtgcggggcccaacaaacgggttctctgaatagcaaagcgtcaatggaaatggaaacaaagcatattcatctaaatagacaattgtctattgttgcctggtgcctgggcagatacaattcgcataaattcaattcagagtctggatataccggtatccgcgctattctaatacaattcaatgttattattgaggttgcgccgatgcctatcagaggcatgtgacggcgcattgtctcaactcccaagcacaatatcacaatagagagccttaactgatgaaacagagacacccgatcgcaatgtagaacacaaacagcgggtacactgcgatgccgactcggttccgcaccactcccgagcctcccaagatgcttactccggctgctaaagaccatgcgactaatacaagatatactggtatccgtgcaatggtaggaagtcctaacgcactcagcatcgcggcgatgaccaaggggaagagcgtatatccgataatgcaaatcgactggaaaaaggaactaacacgcccaggccgcaatgttagtagactgcgatgttgggagatgattcgtagaaaacttacatcttgccaccaagaagcttgatctgaagagtcacagcagcttctccgatccagacaagacagaaaacgcccgagaaaaccaccgacgactgatcaccctttgcgacggacaagaacaaactcaggaccaggcaaaagacaagcggtcccctagagtacttattagtatttttcagacttcccgtgtgtaaattcgcttaccagagatcccagtcccgcaacccatcgctcatgccaccctgcaggaccacgtcggcatccggccagcgtccaacgagtccccgaatgttaccaccaaatccagacactccaccttgctcggaatcagcggtaccactgcccccgcgctgcatcattcctccgagcaagtacttcggccaaagcacctggcgcatcttctcccacacggcaaccaagtcgcgtgacaatgtctcccaaacactctcatcgatggtattttgcactgcacggcgatcctcaccaccgatagaggacgttagatagttgccatagccagaggaattgcctcggttggccgagctggattcgatgttgcctcgcagaggggccgtgtcggaggtattgtgcagggggtcgtcagcgtcgatggctagaatcacaccgaattaggatcttgcggatacagtggtaatcaagagggcaaagaaaaatactcaccatcatcggcttcgatcaaatcatcaccaaggagagactcgtcatcatggggctcatcatggggatggccttggtatacggtagccatggttcgcgtggtatggtcgtgatggtcggaagtttaccgcaagaatggcacttcctttagttttagtcctctcagaggcgaagtcaacaggaaaggtcaaggtaatcggggagtatgaaagcaagttagccaagctgtcccggaaaggctagagtggcattacgtactgggtcacgggtaatgttaccaggcacgttatgtttcagcttttacttctacgatgcacttgcatgcatattatgggctttctgatttgaatgtttcaactgccttgaatctccaaaaataaaatgatcatccgatgtcattaatttgacaatcaattttcctcggtatcagcaacataaggcgcctcctcctgatacacatcgtacttgtacttgcttccgatatggtcagccctgagctctttctgtcccttgccatatatcctctcacgggctgtgagagctggctctgaggggtctggaagttcaggataaagaccgcgccgcctcagctccgggatgagcaggtcaaccacatcctcaaaggtgccaggcgtggtaacatatgcaagattgaacccatcgaggtcagcctcttgtatccaacgctccatctcatcggcaacagtagccgggcttccaatagctaccgggccgagaccaccgattgcagccttctcggcaaccacgcgaggcgtccagcgtggaatatccttgctagtcgtggtcaatgcgtcaagcaagctagtgactttgtttgcctccaacgagtctaaagccgtgatgtcttggtccaatgggattttggaaatgtcaatgcccgtccatccgctgaaaagaaccagtcctccaatcaccgacgcgtatttcttcagctcctcgtacttcgcccacgcctcttcgtcggtcttgcctacaatgggcgtaaaggtaccgaagaacttgattgactgtggatcacggcctcgttctgcggctagcttgcggatgttgtcgaccttcggcctcaacacctctggcgaatgggaagagacaaagatcgcctcagcgtgtgtcgaagcaaaatccgatcctgcaggtgaagtccctgcctggaaaaggaacggcgtccgctgcggagacgggtcgacgatgtgtcgtgtgcttaatgagaagtacttgcccttgtgattgatctgacggaccttatccgggtctatgtacgagtctgtttcggggttgggcgacagtgcatcaggagcccaggaactttcccacagtctataagcaacaaccgccgagtcagtcttccacggcatcactaaccaagcttttgacatgcaactcacttatagagcaccttcaaatactcatctgcctggcgataccgttcgtcatgctcaattggagtatccacaccaatggctttgaaagccgctttcttatatgaggtcacgatgttccaacccaatcgaccattggtcaaatggtccagggttgaaaagcgcttagccagcaaaaagggctgctcgaatgaagttgaggccgtgatgccaaacgccagattctttgtcactgcagccattgctgaaatgggctaaccagaagtcagagtctgatcggaatatttggtttattgatactcacaatagtcgggtctgtcaccggccattgcgccgcacgccgaatacactcgtctagtttgccctcataggtatcatgacctccagttgtatctgccaggaacaatgcattgattccgccgcgctccaagagtttcgccaactctatccagtacccgagagttcgcttggtcgcagacttgtccttgggattctatggagctgtcagcattccggcccttcaccttcgattcctataccaaccttccattgtccaggcgacagatgtcccacggtcgacatatcaaaagcgttaagcaagatttgtttcttgccattgccaacggccgagccattctggctagcagttgcactgtcacccatgattcgtagttttcaaggtgaaatatgcttcctttctttcctacgggcagtacttgctcgcgcaagttcgaagcggatcggacgatggtctataagagtgagacgacccctcatgttccaaaccaacaaagcccggaaggacggctctgtccaggggtactacccccaccatcctaacacagaattcgcccatcgacgacgtatctcgcgccatcgacaatgcaaaagaggggaacggcaagcctccgagccctaacaggttggattcttagagctgcatatggcgtgccgtagaccagaacattcgccatcatctccacattaatcacattatcttgtagatatctttaacctccgaatgataatgccggcataagtcatgagagcctatcggaccatttttctcagcgcgatatcagtattaaggacaaaggatagcacgttagagggaagaatttcatcatcggctgtcagattgcgtgacattttcctcgtcaacacccgacttcgcagattattacatattatgttccatttcaaccttgggactggtctttgttatctaaattaagggatagaaatgaccggataatagccggaacgatgatattcgaatgtcgtatgacttagcagtttatataggggagtgtaaaaggctcggcggttttctggtgaaaaggtccgttggtagtagacctacctaccttagtattggccggagaatatatttcaattcttcgtttctcattgggggcttatccaatatcggtatgtctttcattattacacttaatctattcctagccatgatcttctgtaggcttcttaccaaagtcaaggcgactggcataacgaagactcaaggacaaggatcattacaagttgacagcaatatcaaacccctgtggaatcttgattatcgtctcatgttagaagtagagaatgtacccatggtattatgtacaataatgcaaatatgcaacgccatctatatcccccaatgtgtgatatacaaacataatacaatcgaggcctcagcctcgtcctgtcaaaggccacaaatataatcgtgcttctcacaaggaaggttcctcttgcgagtccgcactttcttgctctcgagagttgcgagcctcccactggaattttttgatgcgttcccgggcctcctccttctgctgaatcgtcgggtatactttcttcctcttccaagccgcaatgacgtccttgtcggaatacttcttcagcatcttcgagtcggcgtcaagggccttgcgctcggccttcgaaacataaggcttgtagtcaaggttcagggtgtcgtcaaccaccaaacgaacccgcgacatgatcttcacagccgccggcccggcgacggaatccgaaagcgtgttctggagggcactccagcgagtcttcgactcgggttttccattctccattgcctcgtgcagttggagaatatatggccgtaacgtggcgatagcagctagtctcagcttcgcttgtagctttctgcccatctcatgtagtttgggggctttggtggatttggagtcttctgtgtcgagtcctctgaggtgcaggagaacggacgagttggcggaaaggatctggatcgtttccagatagccctcgaggacgcgaatgtcaggtaggatcaatgctttgtccatcaaaccgaccagctcgttcgcatgttggagaactgagtggttgcggcgatcacggcggcagacactgagagcgacgtggaatgctgttccggttgcttggcccgagggaaccatctgctcccgcatggttttcacactgattttgctggagcgagagatgcggaggaggcggaaatattggatgtaggtgaaggtatcggggtcaatgcggtaatcgtggtcctccaaagtcatatgtttccagtaggcctgtccaccctcagatccttgagtcatggtgaagcatgcgtttaggataagcgtcaattccttgctgtcgggtttaaggaatgatagctcctccgcctggggaacaacaggtttgaagagttctgagaagtcttcctcttcctcctcttcctcctcttgcacttcttcctccgccttctcctcctccacttcttccaatgcttccatcaactcttgttcaacctccacggccgatttgaaattttcgattggtcgattgttctcgtctacgaacggaacatcttccaattctgattgccgcgtagcctctgagacttcaagggcttgagtttgctcgggagttatcctgcgacgggtcgtcttctcgttctcaataggtcgtttttgcagtatagggatccccatggtttgcttgtacaattccatgacattgtaacaatcaatatcactaccgccttccagaagcaagctggccatgccgttaacaagttcattgtcaatttccaaggttcggttcttccaccgccagatgacatcggcccaaatccgcttgccttcagtaataacctgggccttccgttcaagaatctgctcaatctcatcaggagaccttttctgtatatctctgcgagctgcgaattggacagcgttcaagatgatggtgtaggtggtagcatccggggcacctgggccctcttcgggtaattcaccggcaattttccacaggcgatccatatcccaatgacgatggcagactgtaagcatagcgttggtgtgtatgatatcaagcttgactccagagttcggcgagccaatcgagcggtagacagaggcggcagttttggcaacacccaatgacctcggggctgcgctgaagcccttcaacatgattgtgtatgttcggggagttggtctcctgccacgttttttcatctatgagagaaagtctgtcagaatacaagtccgaacctcaatctcgggcaccaccgaacaaaactcacatcattgtaaaacttgaacgcagcctgcgggtgattttgatccatgcaatattgcagcagatgattccaggcaacatcacatctcaagccctgctttgttccagcacgaaccaaggccgccgccagggccggattaccactgtgcaaaatgcgcgcgacccgatccgccattttgcgagggtcgttcaaccatttcaactcctcgttgataatcttgggtgtgagcttgggcattcctctaggcgggccacgataagtgtcctcgggagcctcgccatcggcctcaatgtcggcctcaatgtcggcctcaccatcttgttcttcggatgccttgtcatcagaggcgcgattctcccgaacctcgccttcatcatctccataatcatacggatcattctccaattcctcgcgttcggcagtctctggatccagagccttgctttcggaagtttcgagctcactgttgtaccgcccggtaaacgaacccgacgcaatagccatcaacatgtcatgctcctccctagacttgacatcctgaaccacccgcctgttatcatgccgacttttaaaatgtttatcgccaacatgtcctatgcggcgagtatcgcgatctctatcggaggagcggttgggataggaggaggagttatagcggcggtagttactggacgcgatccatgtctgtggcagtcgttgggatgcagtagtagcacggtattgctgtgcggtgagcagtcggctgcgcaaagctctgttcacgagcgaccccggaaaccgaaatgtcatgaccgggttactgatctccaggtggaaagcttgtgtcctgcacaatgctataagggagacacggattcaacaggagcgaaatggcaaaatggaaaacacgaagaacagattgttatttcctcatcgcgtgttggagatggtccgctaaacaatttcgcagattatccggccgctagttcatatcgggtctaggcttaatgtctgtatattcaggcatcaattattcctgcctaaggtgtcattcaaccattgatacctcaggtttcttcgaggtccaactagactgcaagtggtttagttcccattccttcaacccatgttccctgcgggcctcgacgggagcgctagagcacatttcccagagtcttctgtgcgtttaaggacttgactagtttactagttcccttggatcggcgttaacatctggacttagcacatgcgctgatccgtggatgaagatatacttccctaccttaaatcaacctatgaagtggacgtaaagcttcatagcactatcacattctctctctcattcattttctattattggatcctcccatccgacgctaccgagccttcattccaagtatacatacatcatcgaacatgatctgaaaatcaaacaccatattcatagtatacccatgcacatcactcactacatcctacccagccatcctcctaagttctaacccaaccggaccataataaacacgacatgcacagcctacctacttgaagtatcacacgacactagtcagaagctaaaaacaacctaactagtggagtccaacagaaacagactacataagcactagccaagtaactaagcaatgtgacatgttaactaactagcacgcggctaggcaggaagaagaagtaagctagaaacgactaggaataactctaaaagcaaaattaccaccagtctcccccacgatgatatcggtggctgatactaacgtccaacacgtggagacgctttactgtagtaagttagttagttagttcctagcttcgtgtcctgtgtatgatgtatgatgtatgtatgttgtacaggccacatatacttgtcttattcggttctagtcaggtaaggtactgtgcgcatgtgtacatatgcagtagttgccagtgcgtacgcacatcaaacggctttgcatggtattgtgctcggtccacggtaagtgccggtactgcttagtgctgatttgggttaggcgtagattgccccgggatgcttgcagtggttcgttattgccaggagtgatttattttgtgtataatactgaggcctgtttgattctctcggctatatgtgcctttttcttataccagtaatgcttttgtttttttttctattttttctcttgcatcatgactatactagcctgcatttgacatttgaactagttagttactaaaaatgtgacatcctttacataaacaattttgagcatcaagacagcgagaatagtgacatttaagctgattgcaaaatgcactagagaggggaaaggacaaaaataaataatacacatcaggttggatgagtccgtggagcataatgtacgttataaaacgaaattgaagaaaaagagagaggagtgaagcgaacacttgcatgtagcaaggttaacacggataagagggaacgggaaacaagactagaacaaagaaccccaggaaaacgattttgggagaatgctgtcgataataaacagatgcaaataatccgccgcccaacccatcgttggagccacgacccaggtaaacgggcaaacaagataagacatacaccacttccgcatcagatttcaagtaggaaatagaacatagagagggtacaaaagggcgccaagccctctcggctcgatgcactctaacacaaaaaggatgacaggtatagaacaaagctggaaaagccactcttagacagatcgggaataaaagccgcagaggttggtatcatagcacgaaagactcgggagcggaagaatggggggtgttgggaatgggaatcggaatccaggacgagaacattagtcaaggacaggggatatcgtgataagaaagaaaaagcaaatgcatttccgtccgtgtaggtccatagcggaagaggtgattatgtgggaaatattattgcggatagtgggcggattgagtctctggaagctgtagcgaatttatggatctgtggacaggacaggtcgaggatgacctagtccagagggtcgatcctggtataaagaaatggcaacgacattactcacgttgcgggtaccccggtccgctctggtagggagagtgagggtagttgggagggtaggctatctgtgcattactctgatagaccataccgctgccaggaggaccaccgtactggccggggacctggctgtctgcgggctggtacccgatcggagggagttgagggcgaactccaccagcgtaaggaggcggctgtccgtgggatgggtcagaggggttcggaggttcgacctggttggcctgggcggcctggacggcagcacgctcacgctcctcgatagccttgcgctgagcatcttcctccttcttgcgagccttccactccttgcggatttccttgaattctaagagagcaaagtcagcagtgagcttaataatgatcagtttccaaaatgggaaatagcgtggacgatgctggctagtgccgggacggaaagggataagaggcaagcttagcctccacgccgtcggccacgctactgcgggccccgcgacacctagtgtaactcactagcgtccgacggcgggcgctaacccgatctagccatttgcgacaagattcaagatctccgtcgcattgaccagcaaaagtctaaaagcaaagaaaaaatgacatgaacttaccctcaggagtacgcttggcgccatgcgattgcatagtcacgtgtgcattcaaatggtttagagtaccatatgccttttcacatccgttccatccacacttatacatgcgctcaatttcctcgtaacgacgacgagggcgcttatgctgctgtgcgccagggattgggacaaaagaatagacctagagtaaaacttcgaatcagctctgatcaaattcaaattccaagccacccaatcttatccccagaaggaagcggttgaggggtagagcacgcggtttttgacgatccctatgacggcggttcatggaccgcatagtcaaaactcagagggcatccaagacaacaatggttgaacaatgtgacaaggcttcagaaatccccccgggaatcatcaaaaacatacctttggagagcgcggccccttgagtacaccaacaggagaggtggaaccaaccgttgtggccggggaagcataaggtcccggcaatccatgatgctgttgtccatagctatgaggccaatccggacgtgcgtacatatgctgaggcggaggtgggtgaccctggtactgcgccatctcatgcccctgaggttgataaggagagtagggaggaggataggtggggctgttggccggaagcgaaggatctataggaacgggcgcgtcagactttgagtgcggactgcgcgggcccgtaggcaaggtgttggtgaacggacttgttgcttgagccatacctggcgcaccgccgggttgggagttgggggcgtaggactgaggaggccggtgaaggtaatcctggtagccaggcgagcgggcggtgggcggagggttcagaccgtagtccgactgaggggtgttggccgacgaaatattggcgggtcgaacctcaggctgcggtgtatactgcggcgtggggcgggcctcgggttgcggggtgtagtgagcagcagcagcagaagtttgttctgcgggtttttgttcagaaggtgcgtcggtgacggcgtttgggtggtgcgaacctggctgtgcgtactcggaagcgggccggttgtccataaaagagaggattcgcgcgcaaagatgccgacgaatctatccagggagatttttcggtttagacctgtggttgaagacgcgtcaacacaacaatgggtcttggggggnnnnnnnnnnnnnnnnnnnnnnnnnnnnnnnnnnnnnnnnnnnnnnnnnnnnnnnnnnnnnnnnnnnnnnnnnnnnnnnnnnnnnnnnnnnnnnnnnnnnnnnnnnnnnnnnnnnggggggggggaagttggggaaattgacgagtcggtccgacacgttccaagcaaggggacgggaagactagactaggttgccacgttgggatcgtggctaacctcttcggacttaggagattggctcacgtacctggtccggttcaatccctggggaattgagatgggatgaagttgcgacgcgaaacactgatcgaacaggtttgcgcacagatgctttcgagataagagatctgaaagacaagggacgatcaattcacaacattcaaaatattggcaattcggatttcgagcgcgtagctgcaaaaaggtccaagagatggaaaagatcaaaaagatcaaaaaagaaggttgatatatcaagattgatgcttaatccttagttcgaggatgccttgcaggtggcggtaagcacgaggcaccggaggcggaaaaatagccacgggagatactaacgaaaactagagactaaagagaaaaaaagtcaggagtcaacgcgacttggagcggcctaaaaggtaaagacgattaggagaaaggaaaggcagtcctcgtgggatccgaggatgctgtggatccgctgggtggaccgcgtaattttggttggcgatatcgttggtcggtatggaaaaattacatcttttatgtttttggatttggtatttctttttggaatatattcaatattgaatattggatctcttggggcacctggaaggataatctacgatgtatatgtatatatataaagcatattggaacatttgcttcaaagagaaaaagaggaaaagaaaagaaaagaaaagaattaaataatttactttctgatctcggaccattccctttttccacacaatactccgatatttaactggcttggccccctttcccctcagtgtcttccttaccggctaagctttccatgtccgtgtgataacacctttttctttttctttttttctttttagtttccagtttttggtttggaaaagaaagaaagaaaaaaaaaagcggaacccatccaagagaaaagtggcaacttgtttctcgcaaaattcttcaatcattcatacaaaaatcctgactatgaatggaagatcaaaaaatggatgtatacaggtgttgttgttttttgctaagggctactggttaggttcccaactggaggcctcttagtctacccgcaactcgggtgcgtcgagggagaacctagcgtgtatggcccgtgggtaccaaccaagatgtcagagaggagccaggggagggcttgagcctgaccaaggtgggcgctaggaatggcgtgcccgaggaacctcaaccgagcgatggaatccaggctcaaaggggtatagagggggagatgtagggagggaactaaggcagaaaagggcgtagcgcaggtcgggggaagaagaagcgatgggactcgggaagaccaggcaggcactcggtccttggtgcgccaataggagaaaaggggtggggtcagcggtggggactggagaagctgtggatagaccggactggtttgagtttagcgtcaaagtctgctgcaaaggtttaaagccgaggcggttgaagccggtgatagcttcttttcctgaaaaggaggttcagtgttgcactttgattacagtatggtacggagtatactgagtgtctaaatatatggaatgggaatatatatgtagcggaatatacaacatatccaaaatgcataaacaggataactatctcctacgtactattgacgttcacttcaaacctatcaagtcatggcaacatctcgtcgcgtaaccgtcacgatacctacagacgcgggagtggagacagtgaaataacaacaacaacccccggtgatcggagccctatctccatctcctgacatctggacgtgtctggaaaaaaaaattaagatcaaataatactccgtagaatgattcgattttagaacaaagtcccgttcctacagtctcgatctcaatccataccatgagtgatttatgatgtttctaccagataaccgttgctaccatagataattatagtacaaagcacataccacaccaatctcaccaaggaagaaaagaggagaaagggggcccatcaatttcctagcgggatttccgtggaacgagcccattatcaccgccaattggtcacgaaactcaccaaattgcgagcggagtcctcggcggctctccggtacgatcagtgtatatagtggaggatagtatacggcagttcttatgtatttgaattccctgaattccctgaattagctattttggctatattgtatgttgtgctccctatttacggagtactccgtactccgttattaataatatttactttcagcctcccaatcagagaaagtgggggaaaatcactcagttaccggtaaaaccccaccctggataaaagcgagtctgataggaagaatacgggaaaaaaacatgcacaagatgcaaggctctcagctcggaaaaccaacacacactctctcagtgatgattggcgcattgggggggcgcatctcaccccgcaggcgcggaacctgttcctacactgccggtgaggaaaagggaagtggatgggggttgaagatatttaatagtttggtatttttggatttaggcatttagtcatttctagttagttgattcttcagctacctaactgttacaaaagtaccttgttatcaggaaataatagtctaatagtcgataatgcacaactcaacaccgacaatctccaaacacaccagtggccagtgggaccagcggactccgcgcggacaacacacagtgtctagtgcgggatatccggtgtcgagcgcagaacgggatgatcaatatcaaattcatacggcgcgtcaatcattggacgccgcagccgctcggtatcacagcgccgtatgcatacggaggtcaaccaatcaataataccttggcctgtacggagtcacttcggacgatcatcccaggccccaatttcccaaagctgctggcgatttgtctatttcttatcctattttttatttttctcatttctctccttatatatacatcctccgtactgtaatataaagcgcctttcgcggctgtgctcaaaagggaagagtaccggccaaattaaatgtctcaaccccaaaagttggacctgcagacgctcatccgtgtcacttgatgcacgtgggcccatttctgcatgttgctgggatattgcatattgcatatcgacttgccctgtataaaactttgtacgaatatcatcatatccacttcgcatatttgcactaaatgaggttaaacacgctggctaatggacgggtcagaaaggagggcggaaaaagtacccagatggggtctggagcttaccgttcaatatatgggtattcttttcccagcgctaatcgttcaggggcgatcagtagtaaaggcttgactttgtattctgttctatgttgatcgcgatctccagccgggatcacttttgaactagccctaagcccaagcccaaacaataagaaaccgaaggaagaacaaaattgccctaagttgatggcatacagtagtctaaagtcaatccagaaattgaagtctgtgctcggcagatacaaatataaacgtaaatatcacactcgaactaaaattaaattcaaacccgcaatttccctaaactccacccgtcgctggccagtgctgataagttgcgagactacgccggacacagtaagtctcatccgctaatacttcggcagatcgcgtttgagagacctgtgcggatcaccacaccccggatgatgatcattgagcggcgattgtgtcttggtctttctcgcgaatttgatttgatttgatttttcaaggtcgagatcgaaatgcaggatgaaacctcgggcaaagatattggcgttgaccttgatattgaaatcttgaaatggcaggagactggcatgagtccaccaatgaacgggattgattgttgcagggattagatgccgagacagggatttaaggaagttcagcgagaatggtatttactagaaagtgactcattgtcactatgcctatgaagacacgaaatatattgccagaatatatgcctaaattaatctagatatcgttatcatttcaatactgcaaatcaaagttatgtgctcagtaacagccctaagaccaaccatgcgagcagtgtatgtatatgttgtattttccatgcatgttctacgtttgctctaaacaacacgaaaacttaaacacaagtacaatatactcttctccgtactttctttttaatctttcctttttcctgagtggcgcaccgcactatcgcctgatacagcagccgtcgtcttactagcgcaacccagtacataccccctggtaaaaaattccagggttcgctttcgatctggaccggcgacatgagtcgtacccacccttgttctccgacgatgcgcgtcggatgaaacccctttagggcgattgggcgattgctatgccgccttgaagacggaggcgcttatgcacactgcgggaattgagttcctcgttctactccgtaccggtactttctttgacgctagtctgctgcccgcactactgcacgtcgctctcttaggcgtttcttagatcttgtactgtgttttcaggtgtatttttgtgtattcttcttgtcttgagggtcacttcaatgaagtacggagtagatgttggatgcatacatgtacggtatgggcttatcgaaccatatactctctacagagtacagaggacaaagtacacgcattgatatcctatgcagttctgtttttggtggtcaaattccccgagtagtactcctccagactgtagatagcaaatcggtacttgtgtcagctaatcacactatcctgatatcgttgtgcacgtggctcggtatttctatttattacacctagaatatagggacctgtgaaatcgacgccgaaaatgacagcctctggcgccagaaacggccgcctttccacccgtaactttggacggccagccgccgcttgaccgcccgctgccctgtacagccccctattctgcacccaaccaggactgttagtcatcctcctctcgtcctgttgttggcgcttgacttcaacgattgttcccccgtttccactggcgaccaaacgacgccgaaaatggctcccttctgcctccaaaccaaaggccccctcctttttgcccagcctggtcgagcgcttataagatgcttcgtccgccctctcttctggggggtctttcaacgccctcctctcatctcaactccgttgccttgatcgaccttgacatatttgactcccaaaactcctatcgcacaacccgatccctggccgtttatcccacttctcctcatggcgcctgtgtccatgcccccagctcaagttgatgagcaccagtactggaccgaccccatcctttgcgaggaaactcgagccagactgaaacatttccggagccttggatggcttcctccaaacttcaagccaagaacgctgataggaatcgccacggtcgaacggtactggcggaagtgagttgactgatgaaataaaccttgcggctggggaataacactgaaatagattttgcattcaatcgaaccaggactacgtgaactaccttctgctggaagatcaagctatttacatgaactttttcgactggatgttcaaaacatcgcgagagaaagcacttcaatcgtatgatgaatactggcgccgcctttgtcaatacttcgagctattcgcccgccgccgcgtcggtgaggatgcccgtcaacagatgcgacgagtacggttgcttcttctgttctgaagaggattgggctaactagagtatagtttcttaatggcgtatttccggctgagcgcaaaatttccagacgaacaaaggacaagaatactctagatgtggatgtcttttgtgtgatctatcggcatcactgggtccattcgcggttttttcgtcacggaagtatgatcgtccaatttgctaccgtccaactctggtccgccattaccgggacccgacctggcgtcttgcttccacagaacacctctctacccggtgactcctccctgagcaagcgcaaacaatatcccacttttcagagtgatcttccgaaacatatccccatgacagaccttccagactcggtctgctatcgcgacattgagctcttttatctacgcgacccccagagcaaacgtgacgttctctgtgcggtcatagagtttcgtaacctgaaaggtcggccggaaggtgctgatgggtaagcgtggttatagtctcaaatgctggagcatcggattaactactgacagtcaccgccagaaccaaatttttcatgcatggcgattaccaactggcatattgtccgatcactcaaatcatttctttcgcttttcgagatggagcatttgttaatgccgaactcacaccggagctcatttggcggctccgagtcccaaaacgcagttcctccttgccgctccgttggaagccagaggttcttaacacgcccctccttcggcgttttaatcgcacgccatgtggctatgagcttcactcgatgggtcgttaccaataacctatgattcaagtcggcaggcgctcaaggagttgggtcgagatactagattcgaagacgatattggacattacaattttcgtcgttgggtcgcaaatgaagtcaatcgtaagtcactccagtgccaaatctccggaaactttaccaccattctacgatgttcgtattaagtctgactaggagcggacaggaaatttcactagccaggagcggcagagagtgctaggccagtcgggtgacgcggtctttgaaagacactaccagtcacagttcattgcacgtgatctccaacatgttgttctccttcggccgcctcaggagggtttattgcgcgtcgctggcagtatgctcaggaagagggacccgttagcgccgtccgagcttaccgacacacataaacgtgctatttgccgacatccggaaatgcttgagttgaaacgagaaaagagagagcttatggcggagatgcgatctctggctggcactgtgaagaatgccgaaaagccctttccacacctttatcaacgtcacaaagctgtcgacagagaaatgaccaagcttcgcaagactttggcaaccgatactcgagagaccgccagaaaggattatttccgtaacgcacctgtactcgaagtcgaccgacagatcaaacagcttcttggcgatcctgatactgaatcatgcgatgcggacagttctgacgatgaggactgggagttgcctaccccgacgtacgttttccttgaacgggctcgcctcgtggagaacttttatggacctgaagcggagaattatgacgaggaccagctgctcgcgcgtcgcatccaggtaaccaaggacatggtcgcgctcctgaggctttgcgagcccagcaggcgaggcaaccgtgttgactggaaattcgacgacgtggatgatgacatatcaggccagcccgagcaactggcgtctgatgatgatacacaagtatatccaacagacgtttgcatcatctgctttggtgaatctcgtcgctcggcgtcgaaccctcctccgcataaatttccttccaagcgaccggactcacttcgtcgtcatctcatcgactctcatctgcttcatgcacacgacgggatcagctgcaactgggaagcatgccgcgttcttccgacgtttaccaaaatcaccgaatttttggcccacgctaacaatgagcacatgtacgatatcaagattaaattgtgtcacctccccagaatgccacagttttaccctagcgacggttcctccagagacgcgtctacggagccggagactcggcagggcaccgaaactcccgcctcctctcttgattttgatatggcaaatattgaccctcgattgatggaaccgggtcctatcaccgccacgaagccatcatgctgccctcctagcaatgaagttctcgcctctgctggatgtccaatgacgagcaccggttcaaacttgacggagattcttagcgggcgagtgacgaggggagcagcaaaagcggcgaatcgagaacctgaccctaagctggggtcttcatcacagcatgggacgcgctcatctcgaaaacgcgggcgcccagaagagctgccttggggagaactggggggaaagaggctgtcgggcgaattgaaatcttccatgatcaaacctacactacgtcggtcaaagcgattacgagccctgtgattcgtgtactcggtctatttatgtttgtatattcgagtgcaatccaggacgtctcagtagatcgtacatcgcttcccagttatgcaatgaatttagccttcaactattatctctccattagcaggtcataaaataagtaatgacctatggtggtcaaacgaaaatgttttaaggaatgataggatagcaattgggctaaacataattctcagatcaattcccaaatctagaggtaccagtgtgtttagtcagcttactgaaaagtcagactaggtgaggctcgttacattaggttgttgattggcttccaggaagatgactaaagtgaccctcaatcgcaacagcgaaaacccaaagggtgtcacgagacttccgccccaatgatctcccccacggcaaacaaagtagagataggaaatctttggtcctttcttcgtcctcaacttatatgcaccgaaagcgtgctgattctagattttgaatagggtccctactttccaacgccagttcagaaccgaaaggaacctctggacggcccgaagactttgtaacttggtatcacttcaaacaatttgaattgatgcggggcttcataaactgagatcaagtacagatcttccttaaaagagttcagaccctccatctggctaatgatcggcttccagggggctgataaactttctcttgaaatgcaaagtaataaatgggcctgcaggagaaactgaggaacgggactaatggagaataaacgctcacaaggactcacataagagagtgaacaagtggaaactgacatgatggtcttcttccaagaacgagataaaactggaacaacgtatgaaagtctttaggtgcaatgatacatagtgaatcattagcgtatagatggtgcctattccattggcaacccgtaaaagctcgacgattgcgtccgcttgttctgaatctaacggatattccgagagagtccagtaaagcttgttgaaactcacattacgaagttggtccaatccatgtctagtagcgaagtcatacaaacgagcatgcaccagcagtgtcttaggatgtttgcacaggtggtttccatctccacaatacagcaaaaatatcgaattgtcgctgtgcacctggatatcttcatgactcgcaaaataattttctttcaagggaagtagatcctatattgcaatttcgatttcatcttcgcatgcagcatgactcgaactatcggctgctggaataaggacagagtagtccccactgtgaaggtactgaaggatatggccaaagatatcctcaacatcgtcgtcaaccacataaattatttcgggcgaacttttataacgacaccggaggctttggattatcccgctgggcgcagtgaatttcttcccgttgggaccaacctccaggtatgccaggggggagataaagtgactaagttgtttttagataacgcctccagaggaaaggaaagcgtacttactctggccgtacttgaatcataatgagatattccgtcggtgttatcaactgaactcgaggcagcaccatatacaggagaatcagaagcgcagcgaatttcttcccgttggggccaacctccaggtatgcgaggggggagataaattgactgggtgtttttagataacgcctccagaggaaaggaaagcgtacttactctggccgtacttgaatcataacgagatattccgtcggtgttatcaactaaactcgaggcagcactatatacaggagaatcagaagaagtgagcagcatgagtttaaataattgatcagtggctaacgagaaatgtgtcgtcgtctacgtgctccctcaatgtgactggtccaggacgctgactcagcatgctggagcaaggcccacgaatttgatcatcttctttcgtggtcttcttctggaacgcccagccccgcgacctgcgtcatttgctagcgggaaaaggggtatctagggtagaggttgagattgatcttggtgtgagaggctcgcccctagactgtcttaccttcagtatcaaactggagagttcaagaacccccttgggggcgtgtaccaagaaatcgaggctagatgagctttacgatggattcaactaacaagctggacatggcgcttcttgtgcagtattctgcatcactagatattcttgaataaaaaccgagtattatagcttccacataaagctcaccggcttgctcagtaataaattgtaataggttgcccttagacacgcattagctcgtgctctcttcataggatttggggtataagagccgttgactaattatactttcttttcttcttctatattctaatcccttccctggttgactacgacgacgtttctgagcgtgagtagattcaatttgactaagccagtatggtgtgtatcataatcttaaagttctgtgggctggccttttcaggtggggagccaaaataacgtagaacataatcgccaaaggcaacagatggagcgatgttgatatctttacagctgtgtattaggaacaagttcttctgcctaaatccaattattcacttccctgggcggctgggcctaacgtagtacctaggaagagagaacacgctccaattacagaagaagtttccataccacttcattttggtagacgtatgctaattagcaacattagtttctcgctcacagtccaccaacaagagaggtggccatctctaaaacaaattcaatgcgaaaagtctcagcgctatatctcaacaacgatagttgttgttaagggctttatacttctagatttttaccagcgtagttttcgatacgtcaacattatatactactaaaaatgcttatcgtgcttggccacgacgacatttgtaagcatgattagattcaacttggctaagtctgtatgctgtgtatcataatcttaaagaacatctgggcgggctgccattccagcaacagcgattcgagagcggttcacgtgggatcatgtggtgaccaacgagagcttgccctttacaacatgtgcccaatctcaacccactctgtattggatcacctaggtatgatagagaccccatcgcacgctgagaaagtcaggactagcctcacgttgacagctcatataccccgcagcgccgaccagaccattccactcaaaccgggcaatcgaagaattaatgaggtcaatgatatcttggttgccgatgtgaaccgaggcaccactgctctcggaggtgacaccaaacgcacaggtgccgtattgaaccagctgatgttggacgccgaaacctatcaccgtctaggtaccaccaccagcgatgtttgcagcgatttttttgtagtctaacacacggggagagccgcccgaggaccggttgataaaggtagagggcccgcagtcgttcacagagttcctcgcgacaagtgtcatagtaggtacaacgggctggggggcggcggaggcggcggcggcgatagccgcaaccatagcgcttacttagaacttcattttagaaaggacggaaggattggatggcaattgagatattactatacgtgctgcacggaaaagtaagaagagagaatgtgcttaatattgttggttgtcttagtacctaggaacctatgataacttatatatgtctatatcttatagagctcctttagtagctctgattatttactagctagacctaataggtacgtaggaaatgagcgagctagtatttatcgtcctatctggcttactatagaaatagaaataggtaatatttcgtaaattagatagtgtcggcgctggcgtgataaatatcgctaagaggcgcgaaggagtctcgtacgacgtagtctttattctccaccctattttaataataaccgaggtagtagctaattaaatgagctatagggttacaacgctctttctatatatcccggctagtatagtttttaaattaagaaaaatttacggaggataacccctaggagttacggtctagaggcggacttagcgtctaccttcccctatatccgatataataaaccaggagagatcctagtctatatattattcgcgaagggaagctgattatagaagtcaggcagagaaaacggatttgctaaacgatcttaaggactaataatcttagggatgatttcttataagtttctttgattcctacgtcacgattgcccaaccctagcctgagacatctgaatggacaatataccgcaaaacgttctagccaggccgtaattcatagtgtgactgttagccgcaggaacctagtccgaagaatgtaatgcctggaggaagctagaactaggacggctagaccgtaagcgcgataccttcggagtccgaagttctcccgttattgattaaattatgtgtccttagcaactcgtgttgtgcctcttccgccgagaaggatatggggggggggcacgaatatcggggggcttagtgtacaaaccaggctagaagaccatagcagtagatcctataattgagtaagatcgatcattaataatatccattctagataggacgtaggtgacaattagttatacaatcaatggtcgcttagtctcaggcaaggtatcggaaccagagtctccgcctatatcaaaattttattaagtggagtgactagaggtgaggccgacgaaaagaacctgtcaaacgatgcccagaatacccctacaccctggtaccgctaagtgccgctagagttgtcaaagcgctatctctaaccaaagagaattatttttgactacttcctgctgccgcaaaattggagcgagcaagcgatgtaacagcctggctagaacgttttgcggtatattgtccatttagatatctcaggctagggttgggcaatcgtgacgtaggaatcaaagaaacttataagaaatcatccctaagattattagtccttaagatcgtttagcaaatccgttttctctgcctgacttctataatcagcttcccttcgcgaataatatatagactaggatctctcctggtttattatatcggatataggggaaggtagacgctaagtccgcctctagaccgtaactcctaggggttatcctccgtaaatttttcttaatttaaaaactatactagccgggatatatagaaagagcgttgtaaccctatagctcatttgattagctactacctcggttattattaaaatagggtggagaacaaagactacatcgtacgagactccttcgcgcctcttggcgatatttatcacaccagcgccgacactatctaatttacgaaatattacctatttctatttctatagcaagctagataggacgataaatactagctcgcttatttcctacgtacctattaggtctagctagtaaataatcagagctactaaaggagctctataagatatagatatatataagttatcataggttcctaggtactgagacaaccaacaacatcaagcacattctctcttcttacttttccgtgcagcacgtatagcaatatctcaattgccatccaatccttccgtcctttctaaaatgaagttctaagcaagcgctatagttgcggctatcgccgccgccgcctccgccgccccccagcccgttacacctactatgacacttatcgcgaggaactctatgaacaactgcgggccctctacctttatcaaccagtcctcaggcggctctccccgtatatcagactgcaaaagaatcgctgcaaacatcgctggtagtagtacctagaaggtatcaggtttcggcgtccaacatcagctggttcaatacggcacctgtgcgtttggtgtcacctccggcagcagtggtgctcgaatcggcaaccaagacatcattgacctcattaattcctcgattgcccggtttgagtggaatggtctagtcggcgctaagggctctataagctgccaacaggaggctactgctaatcttatcgacatgcaatggggtctctatcataactaggtgatccaatacagagtgggttgagattgggcacatgttgtaaagggcaagctgtcgttggtcacacatgatcccacgtgaaccgctctcgaatcgctgttgctggaatggcagcccgcccagatgttctttaagattatgatacacagcatacagacttagccaagttgaatctaatcatgcttacaaatgtcgtcgtggccaagcacgataagcatttttagtagtatataatgttgacgtatcgaaaactacgctggtaaaaatctagaagtataaagcccttaacaacaactatcgttgttgagatatagcgctgagacttttcgcattgaatttgttttagagatggccacctctcttgttggtggactgtgagcgagaaactaatgttgctaattagcatacgtctaccaaaatgaagtggtatggaaacttcttctgtaattggagcgtgttctctcttcctaggtactacgttaggcccagccgcccagggaagtgaataattggatttaggcagaagaacttgttcctaatacacagctgtaaagatatcaacatcgctccatctgttgcctttggcgattatgttctacgttattttggctccccacctgaaaagtggcaataggcaaaatctcagttcagtctgagacaagcatcttgtgatacactaatctggcggccaaaattccctggttccataaacagctagctggggctttcttcggaaattattctccacccgcaggcaatttgtgtggtagatagtattcaatttactgcaggaaagccgagagtatacaagagagccaatatctttcgcgggcgagaccgaaacacatgcccccggctctttgtattgtgtctcacgttctcagtttcatctagtctgctgcttcgagatctaccctccaaataacaaacatttcggagcaatggtggtgactatgtacgctgttcgataaaatatccactgtaatcactaaaagcataggccatgacgggattgccatagccgacgccagctcaagaccgaggcctggtaatgctggggttagcctcggagagccgccatattgcgtctagcgcgagtaacgctggccccacacccgcataataggttgggggccgaaatatggactccaatggagtcataagttggagcaggttttcagcatgcttcccaaaatggccttatccttctaactccaatctctaagaaataaaaatgcttatactgatctcttaaaagtccgtattcgttgttgtacacgttgctggcagatagggcttcccttaacgaggactgcactgcatcgaacaaggtagcccgatccacttgccaaaggtgcgccttgtcttagatcgtataataaaaatccgaaacgaatattaatcaaagagaagagcacactagcataggctaccgcacgctatctttcttccatcaatactaccctaaaataaaattgatcctacccagcctcgaggacaccagtatcaataaactacttaacactaagcgacgcttaactacacaaatctaatatatcttttaaataatatatacatagttgatcatccagcttactatattattataacttccagctattccgtataatatagggtcggtaggcactaacatagccaccgacttctcggagaaacggacatagcacgaattatctcggatacaaaattgagcctatagggagaggacttcagagccacagagcgcctacagtctaaccatcctcgataggacctctcccacttgatgtcttactttttagaactaaacactagcggctacgggccatatccgccgggagtttaaaaattgggcctccttaccgcaaagggggatccgattgacctatggtttgcgttattaaccactaccccactaggctggaaatggattcggactttggtctagtggtcaaatgctggcttcaataactaatatgtgaggcaatgagctcctctattctagaaaatgtctttcgagaatttaaacggtctaggattcttaccaaagaaaactctgagttctcggccaaactgcgaagacccaaattgtcgatccttacctttacagatctagtttattttacactaatcattgaactgttgagcaatatataagtggttggcatacatacatttcactttcccgctgcttccctttcgggtaaaatgtccacagcatacccccaatccagactatcccacatatcttctcctactccccgtaagcctctcaaagcccctgttcgccagattgcttttcgcaaagaatacgtcaaagacaccaaaactcaacttgtcctcaaatcgcaaggtgatgctcaatcggcggttgcatacaaggttcttgacgaatatggctcgcttcagttcactgtgactgggcggaaacatagtgatcgcatttgtcgcgaaattcgggactcgtctgggttacctttgttcgaacttcaccgaagaacttcgctcacagctacctgggctgttacgttacccggtagcaacaatgcaagtttagctattggttccccgcgatggccatttgggtgtctctcagctggaaacttcactctgtctgctgagaatcaagctgcggttgacacaaaggatggcgatgagaaaaaggtcacgttgcttattgagaggcatggcaatgccttggcactatttgatatagtggatggcgataggaaagtggctgaagtgcgcgagagtatacaacacaacgagaagttacctttgacgcggagttcctggcaaaaatatcggcctgctcttgatcttattatcacttccagagttgatcaatcactggtgagtgcctcgaaattattggtggttggacgtcagattgactttgtaatagattgttaccgtgggagtcattttatcagactgggtctttggttcgacttgagtacagttctgtcaacggccggtgaatccgcaaggcctcatacatagcaatagattatcactagacaactatatctgtccgacagttctgcgtacattagaacaaaaagggctctagtagtaatttacggctgacgacttccaaagcgatgtaatcatatagcaatatgggcccttctccagggatacaaattaccagggttgtgtgagataataccctgcccagcttatcactctcggttgatccaccgaccaagaggatttcaaaatgaaacggtgactatgcataactacagtatggattaaggatggatagataaatgactccatttaccctcaaaacgttgatttgaccactagaccaaagtccgaatccatttccagtctagtggggtagtggttaataacgtaaaccataggtcaatcggatccccttttacggcgaggaggcccaatttttaaactcccggcggacatagcctacagccgcaggtgttcagttctaaaaagtaagagatcaagtgggaaaggtcctatcgaggatggttagactataggcgctctgtggctctgaagtcctctccctataggctcaattttatatccgagataattcgtgctgtgtccgtttctccgagaagtcggtggctgtgttagtgcctaccgaccctatattatacggaacagctagaagtcccaataatgtagtaagctagataatcaactatatatatatcattcaaaagacatatcagatttgtgtagttgagcgtcgctcagtattgagcagtttattgacactggtgtcctcgaggctgggcagggtcaattttgttttagtgtagtattgatagaagaaagatagcgtgcggtagcctatgctagtgtgctcttctctttgattaatattcgtttcggatttttattatacgatctaagacaaggcgcacctttggcaagtggatcgggctaccttgttcgatgcagtgcagtcctcgttaagggaagccctatctgccagcaacgtgtacaacaacgaatacggacttttaagagatcagtataagcatttttatttcttagagattggagttagaaggataaggccgttttgggaagcatgctgaaaatctgctccgatggagatttgaggcgcacggaaaccaagctctgactctaattgtggctcgtattttggcccccaacctactattcgggtgtggatctagcgcagctcgcactagactccacaatacgcccagcatcaccaggcctcggtcttgagttggcctgtcaatcctgggatggcctgtgctttcagtggttagaattggggtttgcaattgagcaaggtgcatagccaccgtcgctccgaaagttcgctatcttgagggtagatcccaaggaaagaaattgagagcttgaggcataatggaaaaagccaggaacgattgtttcggtctcgcctgaaaaagatctcggtcctcttgtatacctctccgctatcttgcagtcgattgaatactagttaccacataacttgcccgaaggtggagagcaatttccacattatccctatcgaggaaaccgccaactagctgttcgtggaatcacggaaatctggccgctggattagtgtatcacaagatacttgtctcagtctgaactgattttttgcctattgccacttttcgagtgaagagccaaaataacgtagaacataatcgcaaatgcaacagatgaagcgaagttgatatcttacagctgcgtatttcgtataacttcatatctaaatccaatccttcacattcctggccctaacgtaggagtacttattatttcgctggctaaatcctcggaggcttatgctccaattccgggagaggagacttcgatatcaatttattttagtggatatatgctactttcttagcggcattagtttgtcgcttacgctctaccaagaggagaagtcgtggatataaaaggcgttcaagatcctcccaaagctgatgaaaacgtccttcaaaattagagaccctttcctttgagacaagcatatcacttctccctcggcgaatccttcgtccttgttttagtgtacttttcttcatcatgaagcttccaattcccattgctttcgctaccctcttggcctttgcccaagctgctccatcgggccccggagaatctcgcttggaagcacgagcttctgtcaacgactgcggagactcgaccttcataaatcaaagcagtggtggttctccacttgtggctgactgccagcatcttgctaggaatattgctggcggcggcacctggagagtcactgccaccggcggccagcaccagctagctcagtatggcacctgcgcttttggtatccaaggccacaaagacatggatactgcacacgttggcaatcaggacattatcgacctcatcaactcttccatcgccaagttcaactggaacggaaaagtcggtgcgaagggcgatatgttatgtcagggcgagaaggggctcatgggtaagcccaagatgacgtggggtatctatcatacttgagctatagcagtgcgatcgatggcaggtttatttgtaagttgctctgggatctcatgtgtcctatatacggagaattgggcgctaatcacatcttgaaggcatttcatgatcgagacaagcatattattgtgtcacatgcattttcaggccatgccatgctcagttcagtgtacttaaatagtggaaatatcggagggactgtctgattcaatctatcttacgtatattcgaaactgcgccttaccgtagaaatgtggttattacagatcttagacacttgttgcatgttgactgaaatgcggcatagttttatcacgtgtatccaatcttgtcttatttggctgttcatgatattgagtgtggcacaaaaaacataccgctccggaaagctcgtttcggtaatacacccctaacataatcgcgccggctataacgccctttttaccacagtcgcaagaagttgctcgctaaagtcgcccagctcgaaaggttgagagaacaccacccaatcagcacctacttcgaggtgccattaccagccctcgtcgccctcaaaaaagccatgttcaagcttgaaaacatttggaccctatcccacaaagggtgaggtgaatgaaacgtttgaaatcgcgacagctccccgtatttagataaaagattgttagagtagtctatagatacttttccacttagactaaatatcatatctagctattttagggggtttggagaactttgctaatttgatgactgattagggcgatgtaattcccagtaccacaataacgcaagttttcgatttcttcgaaataggtatagtatactaaaaattcttatcgatacctctctgacaataatggattagatcaagttgtggtggttgacgtacaacgctatattctatcgcatttacgatgtgtttcgcagatgtcggtcgcctggagtgggtggcttggcttggctgtcttgcctgggcgtttcggttagagcggtgggccccacccatggtatgtcattagtgtccgccatggccttttcttttcctttcctccaacgcatcactaccaacacccttgaaaacgaacactggctgaaacatttttgaaagccacgtgattccgtcttgctaatgcacatcattgagagcctcatgctggggtgccggcatttgttgcggaccttccaaaggcgcagccttgttacgactgccctctgccttgcatttacaattttcctgcttgtacctcggtcaagagagcaaaacattgcagtgcgacgcaatccaacagtctatgcttcaaggtatattttctggctacccgagctaacatgtctccttgagagttctgaacgtcgcctgaagcggcggttcacgtccagtcgctaacatgctcatctccttgaagtaaaaagaatgccttttttttaggttcgggcgctgattcggatggggtgggtctcggtcagcttgttttggaaacttcccaggggtcacaatccataccttacaatccatatcctgaatataacagcgctgcatggaaaagaatgtggagaggaacttaccagcagtgtgttggtgcaaatggttcagcactggaccccaggaacgcagaaacagcgatgaaagggtttcgctggaatcaatcaggtgtgtaagtgagactagcctaaggtgaagtgttgtaactgatagcactctagattttccggcgccaatatttggatcttacgaggcgtggaaccttgatcggagtttctgcaccgaccggtactctcgatatgcggcgtacggttacacaggggaagttcaagatggcgattcttttgacacctctagcgaagtgaagtttgagtatgtgaattgggccactttgcaacaagactgcttgcagcgcaatgcagaccgataccacccttcaaatattccaaagacgttgactctacacaaggagtataataaaggaatagatgaatatgtgttgagaggagaggacgcagagacatcccaaagtaacgcctctgctatcttcaaaccacggacagcggtggttctacgcacatggctcgacatggagtatacggaaaacgatctccattatatccagtcgatgatcatggagctgtcgctcttatcgggcgcagaatatgaggtagtcctcctagttgatgcgaaaaatgctagattgcctcgtccaacggacaaggccggcatagacagtctcaaaagctcacttccgcgggagctccaggatctggcagtgttcttcaactcggagatactagaagactggtacccgaaaatcgatgttcacgtgtaagcttgctttctattcattttcgtttccctacacctgttgtcaatttcggaggagacgctaatctttatctagagccatccttcaatacttccagccaatgcagattttctctcggctgaatccacagtacgactttctctggcagtttgagatggattcccgttatacgggacatttctataactttctccagcaggcctcggaattcgcaaagcaacagcctcgcaagaatctatgggagcgtaactcttacttttacatccccgctgtccacgggacctgggacgatttcatcgatcaggtagaccaaagtatgacgggccttgatagtgtttggggaccgcggccagcaaaaggcatcaatgttggaaatgaagccccaaagccaccgcggtcaaacctagaggatgactcttggagctggggcgtgggcgaggaagctgacgtgatcacctggttgcctcaatttgaccctcggcacaccgattggccttttgccgatcgggtgtataatttccgccagaagggacgtactccgcgccgggcatccgttgtcgcaatgtcccgtgtctcggcacggttgctccggcttatgcatgcggacaagactgagaaggggcttggactagcatctgaaatgtcccctacttcctgggctctttattatggactgaaagcagttcaagttcctcagcccatctaccatgcgcacgagacgaatcccgatgaactcaatctccgagctaattcaggcaagccaggtcagatcagcgctgggccgaacagtatctggagctggaaccagcacaatgatatattgatgaaaatgtcctatatgtttggatcagaatttcccgagaagatttatcgagcctggctaggctacgacaatgcagaaaaagtgagtacctgcgctgacgccttgacctgccgcttttccgcgcgcttgggtccccaggttgatattcgctaacaatacgcggaaaggaggggcgtcgtcggctttgcttgcctccgatgttcttacacccggtgaagaacacaaaagaataaaccggctcaatcaagatttgggactcgtcgtcattcacgcgcaccaagcaatgcaaatttttctattacgcactcatggcatataaggataatcacgatattattccggaattccgcatgccactttgtctgttacccaattctacataaaattatcaaggaaagaacgaatactgtctgaaagttgttatgtacaaaatgaccaccgcgggctaagaaccagctcgctctttcgccgcatcatgctccgcgcgtaaagcctctgcatcattcatctcaaacccaaaattccaaagcctctccgcaactgtcaactgagacttagacttgacctttctgggtggtaaaatatcatcatcatcaccacctttggagctcttccgcccaacatgctgcacaatgcttggcgtcactgcccaacgaatctcatttctcgcgtttgcgtattcctccgtgagcatgtcgacgtatccgatgtgcttggacgtgtatagctccacaagctccggaatccgtgagcgaggaaagacaaaggcttgcgaacaacatccaaatttgggcatttgatatacgcccctcgatggagggagcatcgtcacccggcccgcggcaaagaaaagcccaatcagtaagggcgtgaatacaccgcttaaaatgacgactattgtattcggcaagaaggagcgggtgtaggggttgagttttcggaagatcaggagaacgcaagcgacgaaacagacgacaagaatggagtaaagaaggtagttaagccattcttcggcgttccaaccaagaaattcttcggtgtaaaaaagacgcagatatagccctagtaagtaataccatcagcaaagaagaaaaggcaaaacggttaggagttaggggtcagggagggagcgaattcgacggtttaggatttgaatttaagaacctccaagtccgtaatggttaaaactcacaatttgccgctcccgtttctcgagtctgttcttcggcagaggataaggctgctacagtgcggtgataccatccatctagagcgacgagatcatcttcaagcataatgacatacggcgtgtcaactgtcgcacatgccttcaacaagtatgtatagtcaaagagagccttctcgcgccctgctattttagcctcattggtttctagggagcgtatatgattgatatcaatttcggaggcattatatagcaacacctgatcagctagtttgtgtaaccacggctctgcaaacgcgggatgctgcgacggatctgtgtgcgcaataaataggatcaagtgtatgtctgctctttcttcctcgctcagaccttcaaggagtgtgcccacggtgtctttgaaatagcgggcgccctttctcgcaatggtggcaattcccaggcagaaatgaggctgccgtggagctctcgttatctgaggcgctgcagcattgcttgctgcatcgatgaaagaagctgcttgctccagcctgatagccgaatatacgggatcataagcattcattgcatcaaaaaatattgaggttgggtcgcggaaagactgtctgcgcgcgaccacaaagagcaaggcgtaagagagcagaaagaatagaaaggtccgaagccccttgaccgagctgattgctgagaggccaagagtggggactagccggttcacaagcatttttgaaaggcgaggataaaagtaaccaggattcacgttccagcgatgatggtagattaggttgtccgtaagaaggtttttagtgcgaaatattttcataagaaatcattctcgaggctagtaaacccaggcttcgcttagaaaattaaaaattcattgcctgtctcctacaatcagctttgattcgctaattccccatcgggtgaaatccacttattcatagacgagggaccggaagtcagcggacgctatttctgccactagagcttagtccgttggggtgttttctggtttctggtcacaaaccccgggcatattagataacgtattcaactacccagccacccccaacccaaacgattaaattcaaacaggtttatctctaccaaaacgccattaaatcaataaactagtcatcatctatccagacatgcatctctcctatggccctgatttttgcataacccgcatgttggtaatgctctcgttggcggcatgtaatcccttgttttctgtagtgggtaagtactggaagaccaggacagtgattttgaatgagcttgttctaaaccgcgaacttgaaaatatccttgaacaacttgtggttctccggaaggctgattggacacgggtatttggcggtttgaaactgcgacccctcgagccctgggagtctttccaccacagcatatgtttattgcttgcttctccgcccgcttcctccgcttccttgatcgttccagggcatctggtgacgtgcgctgccgcacgctgtattccctgaaacgaaggaacggagtgaaagacaaaccgtgcgtctgcacgaggctgacttgaaagctgagttgacgctacgaaaaacacagccaaatttcgcgccaagcttcatcactctcattagtccccacacgtgctcgcgtctctcttgtctcggggcaattgcgtgcgacagcgcgtccccagtttgcagcaggcttggcggtagggggagggcctagtattaggaaatgcgcgtgatttggggtggagagtgtcgtttgcccaataatattcaatgaacacccaacttctttcactatgtttaaaaagaaaatgaacggattaatatagtcggatttctgcaataaccaattgtttaatcaccgcttgcaaatcctctctgggctcatcctttcaccactattagtcttgtaccactttatgcctattcttgtttattctactgataggtgtctttgcaccatgttgttgcccatttaagcgcctcttctttctgttgcccgcattatttctcgcgttttaaatttgtattcctaatattgactacatatacccatttatattccactttttatctggcgagaatttctaggcttgtatcgaattcattgaagtatatttaagcgacagtaacttcacttctctcctaggggttcatgtttaaccagaagcagatttctgtgatctgccaataggagtattagacacttttttgtccttttgcatttgaaagatagaataacgaggttagcttacccttgatagttgtgcatcacgcatgatggccattagatgttattgctaggcggaatgagagccgaaggcttgcgccgtatagtccaaagttatacacgcgtccttcttgaaattgtcacttccaccgtccgcccagaaagatctatgtccctctagggggcggttagaacaatagttccattcccaaaaagtatccctctggcgatgagccccataggccagcacccgaaaagatcgtgtgtcggggatatttgtgtctctgcaagtgttgtcccatacgttgacttcctttgcgtcgcccgagcaattctcaccggtgaatgcgcggaccttgaatgaaagagctccggagctgagacagaggaacgggattgtctttccgatatgcatgattgtagacggaccaaatgtacgatgttgagctcggttttccaggttagaaacgataaacgatgcagagtagtccgttactctctgtaagatggattgtatggataggagacacaagtcgagtaaaccagccgcatttatagaaatctactgtcatgtgccaaggtcctgacctggacgcctaactgctgccaagtgataaaaaatggttagcttcattttccttggacgcctaacactgccaagtgatcaaaaaaagggatgagtggtacaagaccaatagtggtgaaaacattggggggaggttccatagatgtaggaagagtgttttctggcctatgttctccccaggccgacaaagacacaaatccactaccttaaggccagccacgtaatagatctgtggatctgcgtccaggcgggctttgagtctggagatgtggatccgtggttgggaagctgtggtgggaaggctttggcttaaggccctgtgagatagcacagttgattcgaggccacagattaaaggctgtggacgtggatccactttggacgtacgtccacggctcctaatctaggtgggctttataactgtcaactagcggccaccctggcttagtgaccataagggtcctcggtcttctaactacggtctatataggtcacaggtattttagtctagatctcaagtatattatttatcgcctactaccggcgtttagtcggccgatcatgatcactaccggcttcaattactcgtgcgatcgaattcaccgcctcttcactcacaaccagatcgtcgccgaatgtcataaatattgtgttcgtgccatcctcaatagccgcatcaaagcactgccccagtgggacctaccgtagattctggtcataaaacgttgcctaacgttctcgcgcgtttttagacgccattcgcccaacaggagaggggtcagaaggatcgaccaccatttggcggaccaagcgattccaatcgccgtgttcatcacgtgcgcggaacatgattgtcactgcagaatgcttggctacatcgctcgctccttctcctcgctcacgagactcatcttattccgtgggcatcttgtctaacctagctatttctgttcgtatgcgtgtatcggtctgcgcaggagactctggtaacgacgaggggcgctctaccagagtgtccttctgcgtagcatcggctataacctgaacctgcggcgaagcttccagcggtacagactccgacaactgttcttcctattccgaccggatattcctcattccatagtgttctaagttttgatcgatcgagctcgaaatttctggctgcggttcgaactcgaccgagtctgatctttcttccggtacctattgctagtcctgagtcaggccaacttggctaaccacgggccatgaactctgctctccattcatctccaacaaaggatgatactgtgcttcgaggaagtcaatttcagtaacaggtcttgctgtctattcctgatcagccgttcgtaacagtacgtttatatcctgctccagagtttcctgtggtagaatggataacttgcgggtttgttagagccgttgcgtgcggtcgtatggtttgaatttagcgctctctcacagcgccgcacttttagtgcccacagtcctagaggggcccgcttttatctccgatgccccacgtccttctaaaattgccagtactccttcaactccttccgatgaagaaagctgcgctgctgtttctaccgcttcattctcttgttcgcttacatacgcttccatattgacatccttcgaagattctcgcccagctacgttttcttcactccatccccgcggctgctcgtcctcggcatcagcaaaacggagtaacttgttttccttgcccgttagtgccatggaattgatatcttcaaatccaggggcgaggaggtgttattacctctcatgcgattccatatctgggtgtggtggtaaagaggtcacagatgtcaaacgaaactctcctggtaactgtaggggttgcatcaaggaaatttagccgtgcgagaccgttgattcttgtagttcttgtggttctgtggaggtatatcttgacccaacagaaagctgccccgagggagctctcgagggggcaaatccaaatccagcgtgactatgttctgattcttcatagtcactgaaaccatgatccctttcaataagctcgccgtgctccagttcatcggctacggctggttccatatcaggaagaccctgcttgttttcactgattatacccccacttccaacgaagccaagtcctgtttcggatgctggctccactatctctcctatccggctgccttccgaatcaatgcgcgcgatttccatgccatacccaggagataatgttaagttcctggaataaggtatagaatgccggtcggcacctgaggatcggtgccttcgctactgtcgttgctgttgcctctgtagcttcttcgcttgcttctactgacgtctctctcggcgtgcatctttcaagcgttgccgctctaagttactatcctgcccggctcctgtacccgcagacccaaaccgttctctttcaccttgcggcgaacgattgctcggaataaaaagcggtgacattagcaaatctggagttggagatctacccgctgtgtcgttattttcatggggtattgacagcttgctgaagaaggtaaagtagacactcctcctcaccaaagtagaagtagcttttcgttctctttagagggaatcaccatagagttagtcgataaaaaggaattgacaatcttgcaattaggcctcggcttacggatatccacatcgagtctctttcttagattcccttccaccaacgaattgtgccggaagcttatggtcaagaaggacggccctcaagaagcactcgctgactttatcgatcagagactcaatttcttccctattgtaccgataacgatctggtcgacgggctcttaaaagagcatcttacgcaatttgccgatctagcgactactagataagctactcaatttgtggcgaccaaaacccaagtctctttacgagtacagccatctcatacagtatcataggctccaccatctcccgattaggcttcgccgtaggatctttcttctgtggctttttagataactttgggtagtaacacatagaatagagccagagttatcggtatccaagttctgctaggtccacctaggagtgcaaataagaccgaaacccagcttctaatatttatatcaagaactgcgcataggtgggatcaaaagacataaaagccgcgcgcatagcggttctaatcgttaggaaagatctagaaggtgtgataagtcgtttgatacagttcacgcacaattctaggtaccagagatctttaaagaacgtatacagagatggaattataccctctatcctcttcaatcgcttccaaattaacgcccgctcggattctatgaagtttaaaaagacttcgccactgtatacaaggcctttcacggtagttctatctttcgaggagactccaggtgccaggagttgcaatgtttcgaccgtataagggtcaactttgaacatcttagcacaatcgtgtcccacgagtaaagaccagtattacagtagcctagttaacacataaactatctcctacaaacgtaatcagcatctattctttttagagtcagacaaccttacctcatcgcagcaaatagccagagcctacagaagagatccgatttatattccatatatcaccaaggagggcaagacaagtaacaagtcaaaagcagctcggacactcggataagactctagtccacaaagccgcctagctttattatctaacagccgcgccaaccatcgattctcgaagtatgcatttgcttcatttcgatattatcgaacttttaggtaaatctcaccatcgcttagaactctctcgttagaatattcatcgataaggcttatttaaagatcgggactaatgtcttagggctatcaaaactgcaggaaagcatatggtagatttctggcttaccatccaaatacaagtcgacagtccaccattagtcgatcgatagtaaatagtattctccagcctttaatcgatattagccataaaggcactgtatagaaccagtagagaaatagaggcgtaggtaccggctcagttaatcagtcatcatatcagcggcatttactcgtcctgcttaaagagcctcatagagatactaccgtgacacaacagcgctcacgtggttgtaaatatcgagtcttcgacagccttctttatcaaatatctcacagagtctttctacattttttatattcatatattacgagatagatggatatagggtaatctagctaatattaatcttggctgttccttagtaagtccgacacctttctatcagaacctacagttcagggtctatatacatagactcgtccattatattagtgaagcagagtctacatagcaggagagtatcggttttttatatttaactggtcttagcctcacagaagaaagggtccacctagctgattcagcgtcctagtgaccaatataactgcaaaagctaggggtggccccaagacaaatttagttcaatagatacaattgcattataaatagggccctcttcgccttcaggcgctacacttttccgcctcattttccttccgaccattttaatctggcccaaatatatcgaaacaagataagcactgcacggcacttaacttcaagagctaccaagaacggcttgcgaataacccatcacaagaagcacccttaagcaaacagtcacatcagcttgatacacccgcccaattagacagtagttccaactcgaaaaagagaaaaacgtcttcccggagcgaacatacacgaaaggttgtaagtggaggcccaaagcgccttatcttacctcaggtgtacgaggaaggtatatctcgcgggttaatcgtgagggaagaatcaccctaggacacttatcgtcggactctcaggtataatctagcaggcgaggtattcattacagctcgccgttcccgtccatcccaggtagtagccattcgaaagtacaccaaaggggacataactaaaatacgacagctatttggtatccttaaccacaataatatactgacagcccgagagtacttcgtcaataaaggatacatatatactctcgtcaacaacctccagctcactttagagcaacttatagggtatcggtctctttatcccacagaggcggaattagcttccatgatttagcaggtatatagctcttaacacttcaactatcttaagctcatgacagtgcagattttggatggtttatattacctcaatgaaactggattagaacatcagtctctgacataccggaatattcttctcggcctagatggtattatcaagattggtaagtggcagttgcctcctttataatgatttttctaactcctatagccagcttagagatgtgtgtggaatatctaccaggtcaagcacagaacgtatacatcaaaaaactcgcttccattaccatagagatcatacagaagtatatgaaagataatggaatggtgggcatggataacgtggatcgttagcctgtcgactcagacgccttcgggtttctttccgccctctcgacagcaaagtctattgattctttgaaagaggtacccaagtccccatgtcacgagtagatgaatataacactaacacttatcagcaaccgcttgtccgcaaaaagaatcaattggtaggagagttgatcctgcttgctcggtctattttagtctccgcaaggatgttctattcctacgagaggtagttcgaaacactctcagggaattgtgaattttggcgtgctcatggtttccaagggatccatcatatgctcgtacggtaaagacctgttggcagctccaaacttagcactgcataaaataagaacctagcggtgctatatttgttactgtaggtcctaaagcagcggctagatcctagttattcagaatatcagtgcaaaactaatggttaccagagttatgagtaaaggagatcttgggctcagaatctcatctaggaaattgagatgggaatgaggcgccatttctaaaaatgagacgtaactgccacataagggatccatgctgcaatggatttcatatgtgctgcgtgattgactcatgcagctacgtgatagactcatgaccggcccgccgggagaccacagcggaccagaatcctctaatagaccatgatttttaccacgaatttatgaatgaacttagggacagggacagggacagggacagggacagggacagacaaattggtgtcatccgcaaccatcaacccgcgcgcgtatggggaatacaaaggattggttggaggacatggtcgaataactttagtcagcaatcgctactcggaaaaggccccaccctctggggcatggttccctacggtctaagagccagagaaaggcgatggcatcgtgaagataatatatttgactcaacacctgctggaaccgaccatagccttagaatctctggcgaaagattaggtaggaagcggcaagtctagaaagggatttgaggttaggaaccacccatctttctagcttacatgggtttacttcatgctccacgagcgcttctaggaaaatgtttagttggtcccgggaaaagaccttatcacctccaagcatgaggcctactgccataggctcaaacgatcgataaaaactagtcagagctaggtaacaattaagaacataaacggccaacgtgtctaccattttattctaaaaagctgttcttctgcctctatttaaaagtcagcaaacagccattccgtagagtataaataagcatacatttgatttaccaagtcttcactagctagtaagatcaccccaagccccacacaagtagcaactttccaccaacgctcgccccagcggcattaatcgctcaaaaagtcgcgatctactttttacagaacgaattggctcccataaaaagcctataagatagaatctctagctatcgtggggattgcccaaccttttcggttaagcggatgaccgtttttctcactttccttcaaatcattagcatgattttcgaaataaatatagatccaaatctgcgcaaggcggcgattcacatcatctaatttcgaaactgaaccaatgaccgagttcaggtacctcagatataccacacatgccgccagagacgaattcaagtcaaacatatcaacactaggtaaggtatgcaggtgacagtcgactaaaagagactttaacgcagcaatctggccggatcgcataattataatcaaactatcaccacagtcttcgacatctcgggcttgtctttcgctcagtatctcgccagttgcaatctaacatattatcggaatacagtcaacgtactcagctgcctaggtccggttatcgacatacttataattgtgaaaggttcctttttcgatctcttgtacttccagaaacttaaaatctggtaaagtaagaactcttctgtggttataattctcaatgccgaaagcactagaatgattttcactgggctttgaatatttaggctatcctttttcgttactcacaaggggttggatttctgtgttttcacattctgcagaggcacatgcgcctaaagttgacgttcggagacatattatcattatctctttgttattatctatgggctgcgtcaactgtaaagttccatccgatagcagtgagacttctagctgttataaatgaagctgagggacatatttcagtaaatgctgacgctcagtacagtcctccgtattaataaagctgcattgtgaggtagccagatatttttcattctagagtgcctctgaagtgagccagacatcccaatcaacagggtcatcatcagagatatcgggtccaggggcgccgtgagagactaaagtgtctgggtcaaataataccatcattcatatgctagttaacgacagcaagaaatcaatggtcaacttctcgcaacaggcgatatctggatagcagaagaattgactcatgttcagtcaactaaagagtgaagaagaacgttcactgaattcgagagagctggatacataaaggaagaaagcgaatggcaagaaaaaaaaaaaagggcacacagggattttaagcgcctccaaaaggcgcaccttaaaaggtcacaactgcgtcccccnnnnnnnnnnnnnnnnnnnnnnnnnnnnnnnnnnnnnnnnnnnnnnnnnnnnnnnnnnnnnnnnnnnnnnnnnnnnnnnnnnnnnnnnnnnnnnnnnnnnnnnnnnnnnnnnnnnnnnnnnnnnnnnnnnnnnnnnnnnnnnnnnnnnnnnnnnnnnnnnnnnnnnnnnnnnnnnnnnnnnnnnnnnnnnnnnnnnnnnnnnnnnnnnnnnnnnnnnnnnnnnnnnnnnnnnnnnnnnnnnnnnnnnnnnnnnnnnnnnnnnnnnnnnnnnnnnnnnnnnnnnnnnnnnnnnnnnnnnnnnnnnnnnnnnnnnnnnnnnnnnnnnnnnnnnnnnnnnnnnnnnnnnnnnnnnnnnnnnnnnnnnnnnnnnnnnnnnnnnnnnnnnnnnnnnnnnnnnnnnnnnnnnnnnnnnnnnnnnnnnnnnnnnnnnnnnnnnnnnnnnnnnnnnnnnnnnnnnnnnnnnnnnnnnnnnnnnnnnnnnnnnnnnnnnnnnnnnnnnnnnnnnnnnnnnnnnnnnnnnnnnnnnnnnnnnnnnnnnnnnnnnnnnnnnnnnnnnnnnnnnnnnnnnnnnnnnnnnnnnnnnnccccctttaggtgccgcacccaaacggcagttaatcagttgaccacggttttcctcatggccacagttttcccaaccagccaagaagacacaccgttgaagcatattttgccagtcgccatgccctatgaaaatcctcgtcaacgtaatatcatggtcatggtcaaaacggaatacacgctctctaagaaaccgtgacgtgaaccagggttgaaacagacgccggtcaggaaatggtgtacactttgtttagaaatcgggaggtataccataactggagtaaacaggagctgatcacagaaacatagagtatatgctgttccttggaccaggaaacatattgatgaattgaacgggtttactgtgacggtgaagtgcaatagttgaacagtagaaagggctgtgtgttttctagagggcggtgaatcaacctatggtcaatcggttcattcgctggacccacccgctcatctccccatttctcagattagtcccttctcgttacagctgaaactccgtctcatataaccttactctctattcgaggtatttacgaactaattctctcaaacgatctcgtacgtcatacaacgcggatactaggaagttagcgcctggtttgttattcaaagtaatggacttacccataaccagaacctcaccgcggtcttcataagtatttggcagccgttttatatttcgcccggaagcctcttctaatataatttcatcatatcgaggctttccattgaaaactatcgcgcggcgatgctggccgaacggcttgccatattctatcatttagtttgataccacgaaaaaggacatttcgagtatctatatcatattatcagcgcgagtatggttaaacaagaagagccaacccacatagccatcatccaagatatcatcacttaacaagctgttcagaagtagttaggctacaacagcaatatctgagaaattcagcatcgttagtttactctttaaacatagaggccgaacttacccaatgtttacacctcccatacgaaatgtacccggcgcacatgtgacatgcaagtgttatacccatagaggagctttttaagataagagatcacacctactataccaaaatcggtcgcgactgccaagacgcattcgtaatagtctacagatttgctaactccatacagcccgctaacaaatgctgtcaaggaagtatagccatccagggctatacgatagtgaatagtctcagtaagcccttttcgagcttaaacaaaaagctccaggacatcctacttttctagcaaccaagatatcaccataaacgggtatatctgggcccaggaaaataggcttatcgccggtatccagagacttatatattagcctgcctcaacatataggggccttataagtgcaatccttactttcagtggtattacctctttgctctgtattagtatttgttacacccgatcacatctaatagaggcacaagaatagggacatagggggaagacaccgttcctaataataaaaaggaaaagttcgaccagcaatacaagtagcattatgccaagcggaatgtaaacatacagccggggcagcagagtaccggatggcagataccgccatacagaatatatgcaagctatagccagggcttagtgcagtcgaaggaatggctcataaaggaaacggcgaacgaaagggaaggataacaatagaattgcagccataatcacagagccctaagaagaattagcgctactaatctaacagggtaggttaagcgagagcgatgacaaacaattaatacaaagaggttaggcttctcgcgaagtatccagctcttccgatcagttatcattgccatgatgatatgtaaaccaagaagaatgccagtcatccaacccacagcccgatgaatgcgcttacacgtcatcaaagaaatacccatagcgtttgcaaggaatcccagatggtgtgccaagaacaggaaactcatgtttatcactgaaagggttccggcgcggtctctagccattgttattaacggagtcttgaagacaacaaggaacacatttgttacagcgtacgcgagatatgacaaggcatctgctcgagtgcaaggagcaatcagcctatggcgaccccacaagtacggatatgttaagtgtttcgtaatgaggaatgacaaaactctgagtagattcagaaaggaaggggctatacgaatgagaaagagcgttgtcagtaagcaccccactgcaatggcgtaaaagatcgtgatttccattgccagtcaggacttaggtatcacatatttttcaaatattgcaaggaaaccacggtgctttatacgcccaggatagtaaacttcaccagtaggatgactaatctttataccagaaacaacaactcgttcagcgttaccacaggcacccatatcgctgcttggaaccgttgttactctaaggtgtagttatatctctcgtgatatagtttgttgcagggcggctcatctttgtttccctgccccaatttagcggctcttcccggtcaagcatcgagcttcttcctgctttattcatgaaactcgcaatgacattgtggactactgtggtatttggcttggcacaccctctgatatacttcttgacatagcaactacgagagtgaaaggaaaagcaacaaccgtttttcacaaaaggtctataggcaaaaacatactgcaagacgggttgtaatacacttagtatacggcactgcgttataaagtgcctatcgttgctccctggaaactgtctcctccctggttttctccaaatcacgatctgtcatcacagttggagtcgggtaataagagctctggcaagtcagcgctccgcctggtagatgatgccatgtagtttacataccaattgcgaaataagaaaagcccaaaagcccgaagaatccgccgacaaaatatgcacctgaccagtctcccgttgctccctggaaactgtctcctccctggttttctccaaatcacgatctgtcatcacagttggagtcgggtaataagagctctggcaagtcagcgctccgcctggtagatgatgccatgtagtttacataccaattgcgaaataagaaaagcccaaaagcccgaagaatccgccgacaaaatatgcacctgaccggtttcccgcatgcgaatacctacgcatacatctgcatcacacatcttgctatattcagatgcctttttcagcatatttgccttgcgacgatactgtttttggtgcatcaattttctcgtcgataaattcttagatcgcgtagttttcaaagcagccatttaagctgatgtctttctcttttgaggaagcgacggtctataacaaatgagaggctgaaggtggcgcttgtaaaggctgattgacaagagaaactcaataaaaacaggtgctatgtactttaaaatacaagtacgaaaagttgattttttgaacctttgaacctttgatatgtgaacaaagaagccacgattttctttgcgtgaagggaccgtggtcttgtgttgattaacgttatgaacgaccactgaaacagcaagttaaccgccatcgtaaaactgccgtcaccatataggggttgcagccctctttcacaggcaggtatggcccaaaaaggtgctgcaacgattagactgttcccccgaatagtgaaggccgcgggacatcgaaaagtgcgggtaacatatggcttggattggttattttggggagtggatcgccgtccccaaatagtagaggcagtgaacaccaaatagtgtcggggagtctacgtgtatacagtaacgaaattagccattttttcgtgttgtacaataattagggccaacacggcggaatgctgtggctggcccacctgggtagattgcgttactcaactgtgctctaaaaatgtttatgttcaccatcgatagaccaaacgtgaccaattaacggtgggcatatcacaacaatttttgttgatgtgttactacgaacagtgcggttctcttctgttaagggttcaacactgacggatatttcggttcaaactaattaacagaactctaaacatacagtgtcaaacagacattcatatagttgattattgcgggacgattttgataaaccccacaagtcttttactcatctggtcaatttccattaccatagatattaatttggttgaagagcactgatctaaagacataaaaagctgtcaagtatggattcaacgagatggtcaacacatggagaaagatggcgggcggtgacgttgcaatcaaatattccacaacccaggtttaaacagaggctgtgaaagcggaagctgctgttgaaaaaataggtgcaccttttacttaaggtagtgtaaataatatgattggccagaaagtagcaaatcctccacccggtcatcagatcatgtgcagcccccgataccctggtacaccccaggtctacagcaagaaaaaatttcgaccctggcagtctatattggattagatcggattgggccagttcggaacgggtcggcccggttaagttaaaggtctgggagccatcatgcatgctgttaagatttcgaaatcttgcatttttggaaccttctacggtaggacgctagctgtccccagatcactctccaaaatctacttatgtgtcactgtgcagcgaaaggccggatgtgtgaacattcgtcctcaatatacacaagtatttcccagaacacgtgccgtcgaacatgtgtgtatattaggattttgaaggagagaaccaaccttggacatgcccctggcaaaacatcttcggaactcttcaaatgacacgggcaaagctggtatgacaaatgtgctgtactggtatcaccaatttaggtctagtggcactctgaactacgctaagggagaggctagccggatcgcgcaggtctgactagaggagtcgtcgcccattccccctccactcgtatatacaactggtgttggtaggtagtaatgctactagaaaccaagtaaatttgtattcttttaactacgtctagcgatatctattaggcacaaatcctagggtatcgacaatctggagatacctaaggtacaagatggtacaagatggctcccgtcataatgtaggtgaatacggcatataaacctaatattaaatctagcgaggcgttaacatagtgtataccactcatcaggcaagaattaccttagcacgatctttaagagacgctcttacttgttcgtaaataggggaatgcagaaggaggtagaaatattccgataagtaccctaatataggttagtaggtcttggcgccaggggtggcgaaacaataaaagaggtaatgacaccaactttccggaagtactgtatagggccgaatagttagttctattttgtgactgtcgaccttcgactactacaccgcctatattcccacatattaccaatacaaggtgtttctaaacgagtcatcgaccttatttcgtatatatatctccggtaacagctagaatcttctatacaaacagaagaaatccccacaattatccaaatatcccagtctctttaccgaatggctagttttgttcaccgaacaaatgtatatatagcgaggcccgcacaagctaacgtacgttcgtccttcgccgtacactttcgctatactacgccttaccctctttccagccactagtagccttagatatacaatatgacagtaagaaagtccatagccatctgaactagggctttatcaatgaatacattgcaggttaccctctctcttgacctagcaagcatacgacccattcgccttgcaccccctccggatacaccaccgaggtgtactagatgcgattgcctgggcagcgaaaaaatcacacgtaccacaaatcgcaaaggaaacgctggtcggcattattataaatgccttccttgcgacaagtttctttgctttattgatgaccgaggcaatgatccaaccaacccatcctgccattgcgaagtatccagcaagacatacttggcaggctctgaaaaacgcgctccacggggcttgttttttgcttgcaggctaggagcgtgcgacttccaccaacccttcagaaatggtcgagggcagcatattgctgtctcttcctatgacttggccgaccatttgatcaaccttcgtcttatttagtggtttcggcaataaggtaggaatatgctactgtctttttttcaattgtagcttgtaggctattaatgctaagacgtttttatagcacattcgataaactaccactcgatcttttcaccctagaagaggcgagcttcatctatcgaactcctttagttctgtaagagcaaatccagcattagaatcccggcctatcttaaacggaaaaaggtggtactaatattttaaagtgatatattatatcatgaaattattggatataaatatttttaaagatacgtatatatgctagatcaatatcagaaatggatactatcatcggaactaaaacttccctaaatattatcaatcttctccttagacttctgaagtttgctcttcaagctaccaagtcgggatttcgctgacatatattgatctatttaatacgcagatagaaggatattaaaaaaaggatcagaaacttcgatatttcgtatatcctcgctttgcgcaagctggcgactagtgcaagagatattgttccttttgaggggcagcgcgaacaatttcctcgaatgattggattgcctgaagagcaacaaccgagactctccacataagatacacttgtccttcgctctgtccatcgatgagctcccactgaagacgaacattggagtcacccccaggagctgatacccttatgaagtttagtaccccagtcactatggagtaatccagccagagattttcttcaggaccaggtataccgtagacaacgctacattctaaagagtaccgaatcactccagcaaataccccgagggtatctccttcctaaactgaaatgatgggacaaactttgagaaatacatcatctttgggttgaagggtaacaaaaatagacttgtttcgcgttgtttctgcctttggctgcaggtcaaagaacccaccaagcggtatagctgacggctcgtgtgatccgctcaattggaagatagtctcctctacgctggagaaccataggttgatagcgctgttccacgcaatttcaggaacacttagtctatctgctacaagcggctggctcagccatagtcttcctatgaaatcacccttactctcctcggccacacgctcttccagctgtttaatatggaagccatacttttcttcctagtcccggaccatctctaccaaagaagccccagcttctgatgagtagcttttgcagaagcggtcgaattcctttgtgcgatacaagaggattttgtcaacacccgcgttccgcatctcgaatagtcgtttccagaaaagacggtactggcgttgattagcgaggctaagtccataacccgcttccttcataaagcgctcggtggcgaccttctcggccatcgtgaattcatcaagagggcctttggagattagcaaatcctttaggtcaagaagctcggcgcctttcttaacgatttcccaatacacggtctcgttgaatcgagactggatacttttgcttgctgagaatgcattctcctacttgattagctagactgcatctgggtattgcaacttgacaatatcatccacaaaactctggatctctttaaccttcgttgtcatatttgcctgctttgaccggtgcccgtatcttccaagtggatcgttaagcttaatacagttgacaagtatgttctcgacgatactgtgcggcgctttctcgcctcgataggtgtacatgtcagtcgacatcccagcctgaggtatgctcatcgctgcgttcgcttcagccgtcgatggaggttcggctggtatgtccccttcccgaactgctacggcgtcatccgcctcttgcgccatatctttggtagtagccttgttcgctttggctttgtttctcttcttcttgtgagacggcacatctagccccttgtagtccgctctacttcgtttttcaggtgttgggaggaaccggtaagaaccacgcgttgcctcaggattcggactagctctgggagtaagaagaggtggtagatctgttattcctacccgcagtctcatttcgcggactttgaatgtcagtggaaatagtctcccagacatcaatccaggggctcaccaaagtcagaaatgcctaggatgtgttgcttaataggctcatcgttgcaatcgccgattccgcagattataagcaactcctgaactttgcctgccgttaaagactgaagattttcctccatggcggtgttatgctccagtccttaccaagagaagtcgaggggagaagtcgcgctgccggtattttcggttgcgcgggtaacactaatccgtaataggaaatataaggtctagaccgtggctaccagaatgagatggaaaagaagggaaagcaggaatttgcgggccaattaatacatcaagcctctctcctatattgaatgcttacgaataccacacgagagcttcattatatctctcgtcagccttagtctccaattatcacagtcgggtgcctatatattgctgtatggtgtttgaagtgacgcgggcaaagctagtatgacgtaaatatatcaccgattacggtctagtgggactcttaactacagaaagagaggggctagccggatcgcgcaaattcgaggtggggcgttaaggaaagtcaccaatttccacgtcatatacatgcagtattgctgctttaaatcgagtgcattttgtactcttgcaactgcatctggtgatattcatgaggcacaaatcttatatctacaaccatgcagagtactgctacagtacaatcctggggtagttagcggcaatctggcgatgcttgaggtatacgatacctcctgtgataaataggcatccaagtaatagggcatataaacctagcagaattggtgtataccaccaatcagacaaggattgccttaagaatatgtgacaagttcttcgagaaacgctcttgcttgcttgcttgcttgcttgtgtataggggaattcgatgctagtctgcgcccttcagaatttctatcatagctgagatcagccacctatggcttccccatcatagagttttgcttgaccatagcctcgagtacttccttgccctcggtcgcctcatcctgttccaaagggtctagcccatagcaagccatgaacttgagccagccaccaaattcgttgatgatttttcgttcggcaggagtgacgggtggctctgttcgcagttagactttcattattctagtagataggtttcgagagcatgaggatagccgtacgaaggggatcggggttcggcattttgtagcgtggatgtgaataggcgagggacagtttggaaagtgtcacgacgatgtacccaaattggctttctactccagagccctaaaagatggaggatatggtatgaccggtagactgattgccagttgttttgaatgaatgatgacctcacccaagcataacaccaaccccgctccaaatgatgctgactaagatgcgccaatggtgcagctaaaaatagtctagctgggcccttgcctgtggtctggaagatcgatattcaacctatgatgtgcgctagatgcaaatcttactatcttaattagacttacccgtccactcagcaacagtgaacctgtataaatgtccaaatgccgcgtgagaggtcaaaccgtccccatgaagcgaactcactatcggcttccaagaaaatccctccagcctcttgtacatgactgtattgtataatttcgcgtcgtaagatgccgtatcctaccaaggcatttgatgcggccgtcgaataaacgacctgcgctgaggcattggcagtggggccagaaatcggggttatcaagtgttaatctgtcagggcgatttcgagaatgactgtagaaagagctagaaaacagatattggtggtgtagcagtcgaagagccaacaatcacaaaatggactacagaacttgatatattgccgcatagctggtgaaaagcggatatcctgcgatccaacaataagaactgggatcgaaatcagttgtgcccaagcacatagcccaaaaactttattctcgtctaaacgctccggaacaaccacagaatgggcaataatgcatccccccagacttgcaccaggaccaattattagaacattgagaacagtaatatttgtggtgatctttggtcgaccctctctctccagacagagatgtgacgagatcggcggcaaagccgacagtttcctcgaggacagaacaaaacctttcactcttcatcagttcaacgatatggtcccgtgagatttgcaccagtagctctcggagatttcgatcatctttctgagtacattgatatgcctcagcaatggcaacggggaaatcatccatctgccaacaggttcttgcgatttgtccaaacttctctttggccctttgcttgagctggggtacaaaatatttgtccgcgacctgatataacctgacattgaagatcataggagaaacgcggccaagctcgttaccgctgctatcatagtcaatgccgtacataaagtggatcattgcctcgatagcgcgaggatcatcgtcattcaactggatagtattgtcggccgtctcctatcatctaggttagaattcagaatgaaacctcgcctgtggggtcgtactgcccagttgcccttgtacaatcgcgcaaaatattcagactgcccacagacgattaatctatgcaacttgaattcttgctcttcggttttgataacaaggtccgaaaactgagaagatatgaagaaactgcgacctttagctcgaaataactaaatctctgggttaaattgccaacctctgtatgctagcagttatatcccccacgacttgaccagggtccgttccatggccaacaggaattttctgaatctgtccagtcatctcttcgggcatctcgatctccgcgtgaggaaccgtgtgtatgctttccacacataagctgttttcacggagagccttcttattgtttctcttcatgagataactgtaaagtatgaaccacgcaatgcgcttaggatttgcaggaagggaggagggagggctgaggagcttttcataggaaatcaggtccttattcctaagtgattacacagaccgccttcatgcatatgaatgtaagggtgtgtgatgaacggagccaccgaaaaggaccgaccagtcttggaatctacgtgtaaccactcaatgtcctccttgaatatatgggcataccgccccagtccaacctgttaggtgttcagatcacactcctaagcccgccagcggcccagggccccaggcgcatccccagtaagggctttggattggtgtcaatatcgataagtggtgatttcctccgtcgtctgactctccaggtatacgcctcagttaccatggagatcatgcagtttggggggttagtgaaaggcaatactggcactgaccaaatctgccagcttacaccccccagaatacaatgatataggaaaagtttagacacccttctgctaccgccttcctggagactccttaccgccctgtatccgcggtcttttattagtgggggactggctggcagaattagggggtttcaaacttttgcagtcactgtatcaaggcatccttgctctacattcagccacagcaagtgtctgcagggcgtcttgtcacacatgcactaccgaataggagaccactgcggtagttgtatttcgaaattgacccacttcagcagcaggcaacgtaaacaatgggtgggaaaacggaggtgatattgtatcaattaaaatttaagtttttagatgtctaaatatgaggctgttgaaagcggtgagaaggtcgtttagatgctgtcctctccggagaaatcgggttgatcgaatcaccttctccacctagctgtggtactgtgaacagcattatcaacgtgattgtctgcttgcttccctcgacaattttcccactatgcggataggtcctgggagcgttatcaaacttggtttgatagatgaatgcaacctccggcttcatatcggttatagaatttgtggaatctggtcatggtaaagaaccacgaagacatagtatgagctggagaactgggatgtcaaaatgtggttagcgtatctcttactcttgctgagagtgccactagatcaaaacaggcagcatagttgggttgtccttctctgtcaccgctatttcctgctattattctgccgcaccaaaaattccattcaattattcaattattgtaactaatattcagagtaccatccattagactcagtaatagcctgcatccaacgtggcacgctctctgatagaccttctcggatatctaagtcaagttgctgcccggcccatctctaaaacatgttggggatcgagccagagcaatgacgtcatttaaccgtattggtggtgatcaatgggctcagaggagattcaggactcaaaatagcctatctgccctcaagaatgcaagggcttagcatatcaccgctaacgcaggccaactcgaacactactaattcggaacataaccggttcggcgaagttgagtgttgaagtcggcttgtcaaaagatgaggctatatcatatcaccatatacatattctacacccaagtatatctagctcattaatcaggatgaactcgttttgttacaggtaaaagacgcaaaaagcgaaagataatttgacttaattcaatttagtaaaaccctcataaatttagttgagaccgatatattatctgcggctcgaattaaggggtgcgggcgtgttgtagaaaataggtctgttcaaatttcaaaaatccggatgaaagcaggacttcggtcagatgcatttccgtttcaagtgcaacgaaaatagaccgacctgaccgcaattaattcgtatggttcacgatcaacaggggtggtcaactaatggtcaacgtgaggaaaagcaatggcgggtggtgaaattgtgactgaacgtccaataaaccaggctttttcaagagggcatgcaaaagtggtgtacattactgtacagcgtgaaaagattggctaactgagagctcctttcccacctaaagcgctggtccgtgcatttcctaataccctcgtacccccgggtcgctgacaagaaattatttcaacctgctcgcctccgcttcatttcgagccctcgggtgagaccggagaacttgaactcactcttctctcgtgtggttcgagtatgtatactagctccaatctctctatccttgtttcccaaggccccataccaagcgcgctagattgcattagggtatctttccgctggcctcggatttgtccttctacgaaagtcgccatgaattacagttatgtgatttctgtacataaccagtgtcaccactctccaagtatttctcagatcctaaatacttaagcactctaagccactgaggcccagagggtaaagcacgatgacttgtggttccaaagggtactcaagagttcgctgtaaattccgaagacattcacgtctcctagtaggcctgaggataagggaaagtagatagcctatgtagtcagcttatcgcgtgcgtaattcaaacgtggtggagacaaagtggcttctagaggtatggaaaggccagtacatgaattaatgggaagcttgcgtaaagtgatgagggtgggaaaagtgttggaacgaggcctggaaaatatggcagaaataggcttggcacggggcttgatcaggacatctctaacctgggtgaaatgaattttttactgtagacttggggggtgcctaggtattaggaaaaatgcgctgatttggagtggagacagttgtctagccaatgatattcaataaacaccctacttctttcagttatttaaaatgaaaatgaattatttaattttcttttcaatcctcacatttctgacaaaacgatcgtttaatcaacagctgcaagtttgcttgccgttgggcctcgtttctcaccactatggccttgtactactcgtcgatgtcttactgactatgtgtttattcacgtttattctactgtactgattgtagtggaaagcgtcattaatattgattgtacttccggtcaactcccaaataatcgttggttgcaagttatttattgttcatcaacatcatgtctcttcaaccggtggctttgcaattagcccgcgttttaatttgcactctaaatattgattgcctataccagagctcactttgtatctcgcgagtgggaccctcacttttcaccattgtgactctgcaagcaatttagctatcccccactcaatttggttagcgtctttatctccggtagttcagagtgacgctagccccaaactggtaattttttaagttgtggaccgagaataggcaaggaaagaactaagaacacagagtatatagtatttgcagttgcgaggcttggtcctgcttcattctactatcatcataaaaaaaacatcgttgaaagtacaaatttggctagctgtctttctgtttcctagtgttccatagcctttctgtgttcctaaatctgttgctctttccatctgaatctagaatatcgaacatgggagtttatattgccgaatttgggttagcgtcactatgaaccacaagaatagagacgctaagacaatttagcgtaaaattagaaaagacggcaatagaaaagcgaagggtaaccaggcaaagataacgcctaaagaaacttttcatggatgttattgagcaatggaatatataatgataaaataaaatgcaattgttatttgagggtcgatcaaatctgcgttttcaatggagaataaacgagaagagacacacagtgagtgccaaggctgatacgtgaaacattggtcgatgggcaagaaaaaatctacaaccagtgattgattcaacttggtctgttgaggtgaaggtgaagaaacccattttctttgtttcatagagtcatactttgattacttgtttcagatcacgtttcgcgggtatccggtatctatcaggccccagggcctatagctgaagcggatcgccccgtcctaagttgattatataaagcctacttccaatctaggcttagtggtactctggacactgctaagagtgcttagtaacagcgtgcaaggttgactcgagtgatgttatcaaaaatggataccgcgggttttcaaccaaatgggtcttaactgtagtttttagacattcaaatgccattaggtatccctaatgactcaagtgttacacacttttgctgtgtctatgaatgctttgtatatgggatgaccgagaattcctacgggggtcggtggaatgattaaacaatggcaaataacgtgaaaggcagtggcagaacggcgtgcggaataggctacagtcaaacctggataggcgcggagatgacaagaacctcgtccagatcgccgagtttcagagcctccaaaagccaaccacaccgcttcaaccccccccaccctgggagcaggaagttaatctagctaaattaagcctagcgcaattagagtgggacgttgggaaagaaagcgtgtgggtctggtggagaatctgcttccgaaatccttacggaacattatataaggcagcccccaccacccgtcttcagcccgcaattgagctctaacattctgccccgcgttaccactcccccagtttgcgacaaatcgcagtggtgtaaagtcgaagagaagtttttcattcgtcactctctcaggatgtccacaccaaccagaataattcgtgttgaaaacaaccctcagaaaataagggaaagtggcctactccagcagtatggttatgagattgtgaccaaggaaggggaaacatacctttctcctaatcaaactgatggagggagagacaaccaaactgagctactcactcaaatggttgacttgggatacaatctctcgataagtgggataagtggagagcgtgtcgactgtcgatatgtggtaagagcccttttccaaggttgaattcacaggtttaacaccgatgcattttcagggcaacagaacggttagctaactaatccttctgtgacgacttctattgaattatatgatataataacctgggcgtcaatgttagttgaatctgcatttggttgaagcggacagtcaagagttgattatataaaacatacttccaatctgagtttagtggtctcttctcgggctgtgccatgtgctaacaaacttaatcgccgtgtatgggcaagatagatgagtggcaaatgcaaacacacttcatttttcggaaaaacacctcagccgggatccgggattagctgacataagccgactggacgcaccacctagttaactatccagggcttgccaccgacatcctaaactaatgtgtcgacttggacaaatccacgtgtattatcgtcagtttccagcgtctggggactgagtggaataccgggatactcgaatgcgcatactaacgcattcatgatgaaaggattgattgaatagaaagacatgcgatcgggggcatgttgaataccctaggtcaatgctaatctttgctagcggtaagttaccgctctaatgctctgacaaaaatcaaaatccgaaaatttagtgccaggatttctccgtgtggctatcatttgagggctcctaaggaactcattcattttgccaagttacccttgcattgtcgccacgtcctagcgcactatatctattgaaggtggcaaattctgaccttgggattttctgaacaactcaaaggcaagtaaaaccatgtcccttttggcccgaagcatagtgaatggacgccgtggagtggcttgctcgtatagagcagcgctgcgaacttcatcctcagtgaaccagcaatgatcaaggtgctcatgactgatcttgacggaactttggccgaccggctgttgcatctcgctggaccagattcgttgcgccatcgtctcttcgttgtcgatggtggtgaacccgagcgtgcgcatgaggactatatcgccggtttttctatcttcgtgatagaaagaacacgtgaaagcattgccagcaattctcgaaggccaaatttgcgtctcctccccgctttctcgggctgcggaatggatgatggtcgggtcctcctcgtctggggttcctcctcttgtctcccaggtattaccccatgagctttccttgccgtttcgcaagatcaacagaacccttagcttggatgggctatcggggtggtaggaaaatgtgacagccatagctgtgaagcgttgaatgggatatagttctttcagacgatcgagaggaatattgagaatggccgcattgacccgcttgggaaggcccaaggtggaccggcgttgtttagtgtagtcgacatagctgagtatggggaaaaaaatcctggaccttgcgagggtgccatgacacttatatattgccatcatgtctcttccagcccgcaatttgatcgaaatatggtattacgtgagaatacaagaatctacaactatgttgcctagcctcctgccaacgaggatacgcatgcttcgatttccgcgaccgaattgtttagtacgagacccgagagcctatcatgcagaaatgtatctttacctcattgatatcgcagggtgaagggattacaatggtaggatgtactgcgtcgtgcaattctagtataaggatatagattcgggctgagtgcttctgataccaaaacgactaccacaccaccgaagtaagttacgcgcagccaaataacgcgcagaaaatggaaagctgctttagttcgtgagggatcccccgaaatggggttgactcatccaccagacccgatggagccgcttacgaaccacctattcttctgtgggcaaggggcaagaaggtacgtaacgagagatacaattgtatagactaaattgaagtattggaagaaaatagatgggagacaaaaggacgtccttcaacataaagcattaacgagtcccagtagggttgccctaggttgctgccaatattgtggagaatacggcatttcgcacttggcataccaatggtctcctccatcccgcaaaagtccagtcataagatatttgccttcgacgacctgcccttttataaggttggcaatgccctgggccttgacaggctgccctagttgtaagacaagcctagttaacatcccctcctcggtaatggaaaactcctgattttgaagccagcccttcatgatgacagccattcctaggaaaatagacctcgggtgtttatcgagaatccatagacccgcgtagatctcagcaagcctaagtttgtctccacctcggtcaagcgcataaaggcgttgacaatcgctgtgtgcttccttcgaaataagtttgtaagaataacctcctatgggggcctgtctgttcgtgcgcattatcatcaagtctatcacatgtcagcctctagctctagcttaacaaagtcataacacgcttcttaccactagggactagatagagacccggcttctttgagcatatttcttctatcttcgacttccgggaaattgaaaaaatgggttgcttgaatagctcccaaatatggttgcagctctcggatttcagaaggacctcgtatatccgatcaagtgtaaaatgcgtattagtgctgcttcttccggcgcacaggttccataattcgtcgtcaacaggctcatacagagggcacttctttgcatcgagttttatgataaagtctgtaagttattagccgatatggcatcgcctagcatgtacaccctttctgaccatctggaacgtcatagatgttcggccctattcgtctaaattctcgtaagaatatatcaggatctgggggtccttgagttagctttataatgatgccgtggttggagagcgtaccatgaggagcgaagtccatttttgttggtctgacgcttgcttttcttaagaacattgctgggtgaggtctttgcttttatatgcttaaatggtacttgccctattcacatgctggagctgttcgtcatcctagaacggcctagacgatctgttacattacaaaaaagttttagaagttccactgagccgatgcatttggcttgcgatggaaaagattgagcttgctcaaagctaaaaagcccgtgctaaaacacgaggccactattctcggacggataccccactgatcgcctaccggcaccgatcttgccaaaatagattccctccaatctgagagtatcaattggaatgtcactttttaatggtttgatccttacctagtgtttatcaagctatgtcgaaggatcaataatctacagagtggttttaacgaagtcccacattgcgaacaccagcaataaagccatgggtttccattgcccttcggtccactcaaactcgaagaacaagcatccaattcaaagatctcggtctttgcctaatgtttattaagaatctggaagaagtgaccgcatttgaataaaggatgagccagaccactacagttttgtacgctatctgcttcatgtgcatagtggatgtcattttcacactgattgggctttatttgcacagaccctttcatatacattcaggaccctttgtcaaattaaaccaaccctgcaagcctcagacggcccactgtatattgttccgattcggtcatcctagcgctctttgccgaaaaatttcttaaaactttccgggtccaaatcgccgttgaacagggtactgtttttcttcacagacccaccactgatcatgtggagctgagttccagcgggatgcttgcctctggcgtcgccgttgaatacacgtgaactttcgtctatttccatcccaaaaaagccatgcgcggagtgtcttgaagaagcacctatggggtaggtgggataatattaggtttttgatcaagtgagggcagcaaggagtgggacaaaatcgcaataccttgtcgactgctttcctcctcgcctcgaggaacgagacctggggaatggttctataaccaaagccaagtggttagctagaagatgacctcttaagggtttcttgatcacaactcaccttgtcctgcaaagagacgaccatatcctccgtatggtgttgagaagtgacgggagggccacctcgagagtgttcttctttattgtttttatccatatcaagcaacgagaagtgaacggccgaagataaaggagactgagaaaagaatttcaagtggaataattgtagagtggacgatatcatatttatatcctagggtcctcgctaggagatcaatcacaccactctcaagatgaatgagactgaaaggactggccatttttgcagcaagtcatgaaaaaatcaagcccagccactcttaaaatgggcgtaatcacagccagatttttgtttttaggcgatctaggttcctctttctcgtaaataaaccttgccttcgacaaatacaacgtcaggaagctcaatagtttcacaatctgttttgtcgttgggtttcatggagatggctcggggtcggtttgctggcaattgaatgtgagaacgccatatagaaaagctcacacttcgctggaaaactcacaaagtggagtgcgtgtccatgctgttctctctgtttgatttgaaatgcatactggtagaggcattgtggcgttatatgaaaatttggtgttttgaagctcatataccgctggttcggttcccgtatacgggctggaagaattggggacagtttgatccaggcgttctccactttgctctcgttctgatctccagagggatagtatccagttcggaagaagaggccggagcgacccagaagaaagacagtgcatgaggccagttggtcatccagcttagagtagtgtagagtaatatgtggtaaaaatatcaatagagatggaaggcttcaagtctagcaggttaagaaggtgcctatttctactatccaaggtggccatcaactgcgcctggtcattaccaaagatctagccatggtgagtacccgcccctctctctggtgacgatggtatgctcacatcagaagcccgccccgattcctgcccaaatactctatgggccggcaaaaattgctttggaggcaatgctcttcttgagaattgcatctccatcgctcttggaatggaggccctcggaaaacctcagccaagatgctgaaatgctgctagatgcctgcaagactctgagaagcaggggatcccaggaaccctatctcgaaaatgacttacacctccacgtgggaaatatattaccccgatctcagttatggtgctgttctaatgctagcgctgatgacttggcattttgatgcttcatcttctgaagcatcgcagggcttgattgatttcttgagttggccttacgacagtgaagtgaagggaatacttcaggatcgatatcgaagcataatgtgcggaatggactcctcaaacttcgactttttgcttgtccggaactgagccctatctagtgatctgtgcaactggtaaacatggaatgtattatatctgctttgctcagcagtaaccgagctttctgaaacggttacaaatatcttcgagacgttccttgtaccagtcctttaaaacgttgtggatctcaaatccgagaaccttcccaagtttgcacctttttgcatattcctgcaggtatttggaatgaaggtgctggtaacaaagagctttctttgagtcaaagtgccaccggttgttacaaaataatcggatcatcgctgcttaagggaatgaattttataatcctatatttcctccgaacccgtaaaataccagactcaagcaccgcaagatccactaggaatgcttcatgctgatcgccaagctcttgaagagcaatggcatcaaaaaccacatcatcgagaccccttcttttgatgtcctccataagtgtgagtccattgggatgaaaccaaattcgtacggtcttgtttggttagagcctgtgttaatgtggaaaaagggtgacttacatgtaaacgaatcggtactgagtttttggcagaaagactagagtctttcgtagattcatgcatgttacttcgattgggatctgggcctccaaataaaagcgtttcgcgcgagttgcccggggaaaagtaaaaggaggatatgcagttcgaaaaaacacaacgaactctatgtaggctcaagcagaccatggtcttgcagtcgtgaaatcctggtcaatgattcggataaacctgagaaacagtagtttatatcatgatgatccagcagacttgtcatttctttggcatatgccactgattacaggtctaggatagtgaaagttagtttcaaccaaatttcaaattaatgagaaacagccttctaaaaatttgagcgatgcccgagatattgtgcgaaataattagtgggctctctttgatccattcttttgggcggtctcgaaagtccgaaggcactagtatcatactccgtccacgtattttaagtccatttttcgcttctctgacgttgctaatgcgcatatgagctcatgcggtgggcatatactgcgccgcaattgattacgcgtgacaggggtataggttcccaacccatacccctatcgcgcccaatcattcttattagtagattttatattgactctccttccccactatctcctcagaggactgaatcatctattctacatcgtactatcatctttgaatggcttcgtttatccataagatagaatccagcaatactatccactacgtcaccagtttagagaggcacatttatcacctccaggggatactgagagaatagacgccttacatcccacagcatatcctcgtgcaatctcaaattccactcgaaaccacaccatcccatcttctccagcctcccagctcccaaaccctttcagtgacccagcgtaaaagggtttcgctatcaggttcatctcgatcggaagatacatagataaagccattagaaagtttcatcaacaagattccttacgcagaaaagtagtctagagccgtatcttcctctttccctcaaatttccgttttagatttattattccaaagcgaaggttacctacaagacagtgatcccccaacatcagctatcccttctcggcattcagacatcatccaaactcttagggcttttgcttcgctcacacaaaaatgcgccaacaatgcgaagtggacgagattgatatcatcctaccagaatttcttattaagtgcgctttaccatattacgtattatctcagtatagatccaagttcggtgaacaagataataagatatatttcaaaaggcagagccaaccatcttcaggaacttcggcatagtgcagcttagggggtcgaggcaattaaccgccttcaaactaagagcggttaggatatcagaagtagtgatatattattttactatcaggcttctttaccaattaagttcatacggaactaacaaatgaatatagttaccccgacctttacttcattaaggtactaggcgaaagcaaccaaatcgatacccatatttaccacccatctgaaagaagaccaatataagaaaagcccagagagtctgcactcaaaccatctctctattccatacatcatcaaatacatatttagcaaaagtgtccagtacatctacaaaccgtttcgcttatcgctttttacttacaattagcctagattctccgacatatataatattctacactacaattttaatattgctctagaatcgtttgcaaaatagtacctagatccatttagttcagatgccatagataaactagaaagacaaaggctcttctttcccatacatcagttttccctagacaggcaagctaactttagggttaaatcccaaactaaaagggactcgcagcccacaagagacttattacacaaagcgcggaaaagacatcgcgttggcagcgggaccaattcaaacctagacggcccatctctcaatccaattctgtcggccaatgtacaactacagacaacctctaaggaagatcccaatcgttccaattcaaatatatcgggtaagccttccgggcaataagatccatcaacatgatactgactcccacagaccaggagagagcttccctgagcaggaatccaagccctgagggtttcccacatcaagtgacatgtgaccatcgacttcggcttgttagtccagatccgcaatatacagtccacgggcgttagacagcatgttcgctcccccaaattcaccaagatgactcacgtaggtcatcgacaatgatgaatgatcactacagaccaggaggtcaagtgggcattgtcagacaaacaatatctcctgctatcctcccattagaaccatcaccaagctttacagaccatcaatctcccctacactttcgacgagctgccataggatctctcgaacgggatttgcccacctccagtggaattcgagggtccgcgatcagcgaaatgctcaatgtctcgaatgcagcagtctgtgatgaagtgattcttccaccgataggaaggactggcgtggctaacggattgcatggcaatttggcaacgagcgatggctctcaggagctacattctcaattcactccatcgaaccaaagtttcgttggcggatacccgtcacagtattctacggctggctaaggtgctcaatatgcaggggtcggtgagccgcaagtcgttgacacatcactctgctctcataatatgttgtcttcattgctatttgaggaacaagaaggcccgcatatcgacgccgagccccagagagttgacacatcccttcggtcgcattacatgctgcatgatcttctagaccagtttgaacaatcacgacaacagcctaattccgacataacctaccaaacgcaattcactgtctagcaacaacaaatggagagaatcagtatatacaagattcgatcacgcagtcataccaagtgatatagactttccaacacttccctaatcgaatcgccgcattcactccctagccatagttatcatatattcattttttctttattacactagaaacataaatacagtccataggcaggtatatgacatcttcgttacatacacgggttattaatcccagtggtagagggcgtccttatccgactcacagagtccccgaaataacaataagatcgccagagcctgctttactcttaaattgagatgatgcctcggttctccatacagaatattcaaatccctatagctctagtggtcagcctactacataacgtactatttattacagaagatacctcttcgtaaaccccactgtcaactaaaagagtccaaacccgccgtcccaactcacggtcgttgcatgaggatacacctttcgcaaatgcttcaaaagatgcagtactgaaccattgtgagaatgcttttcgtcgaccttcatcgatggaagagcatgtcgtttcgtcaggcggcatcgcttatccaaggataaaggtaaatacatctcaaaggggcaagttcagctgatcggaccctatagatacatagttactataatcagtttctcccttgatttatcgcatctttccacttactaaatatagtagaaccatcgcggggaatattttatattatcgtttcctagtcagcgcccaacacataacccctcatcacgtgccattttgtattatcatatgattaatagcgccattatttaaaagctccgtataatctcacctctactaaagtaagaagaatccaaactcctattcctctagccttcacagtgattatagctggtttccacttcactaaacaaaagttaggcaatgatcttatctcatctatttctagtcttctcaactcaataaatatcccaaaccttctctggggcaactatctactcactatttatagagttcccacgattatagatatcagtattatctcgattggccagagcatccactaatattctaacaggaagcagcttttattattccagatgatctcacccaggtcgcattatcttcacttatgagtactaggtttttaccctataaccaaagcttaggctgtccacactcagatactttacgagtcctaccggtattcaagcacctgcatattaataataagcttatggtctcgctttatcggaaatctgatatgctataggagtttgaagatctaaggtacttacctaagaaaaatccagatattataattacatcggacgatcgactcccgtcggcatctctaggtcatggccaaggacgcttctcgtcgcatccttataccgtgaaactcccttatactatgagatattgcgaggccctgattctattactttaccgtaactacaattcttcttacgagacttattagttagctattctaagctatatattagaatatatcgacggtacagacattttagataaaaacaagctacaagaaggttacagaaagttttaccataccctcaaacagggagatcctgagatatattcaatactagataagctccgactcagcttaattgaagagcgtcgcctcccaataataaatgattaacaagaccaggctaatacctcaatctccaatcaaaataaacataatttagccactcaaactctagatttcaaccgtcttctcacaatcaaatccttcagactaagtgaagtaataacctctttagtttaaggtcactgttttcccagttttcaagtcttagaagtcacaattgaaatacatgtggccaaaagcccaaagtttaacaaccccattttcccaacaaggctcacttaatagatcggtcataaaagctaaggagattttactgttcctatatctaggatcgacaaccatagcgtgggttgataggcagaaatgagtaaacacgacaaccttacgatcaggctccaagcgcgaaatatattcaatttcttagttcagccacactagatcggtatagtgcgcatcttgataggcttcgatagtccaatcatcaatataatagaagtcattcagaccgaaattaacgctttctttttgtgcttgggccacccgcgagaacaaagtacatccgaggacggtgatcccaggtgaaatgtcgtagcgcgtttgatcgagaatgacaagtttaccgagcgtctcgctggatcctcgagtgccgtcaattctcgttttgaacttgttgacggcggattttgtctcagaccagctgctgtgatacgcttcgtgattacccatcaccaaaaaaacgatgcggaacacttccagctgcctacgcaggaagtggaacaagccttcgtctttgacatagccaatgtcgccgagtagggctaaatatggtgccttggggttgacttcgaagacgtcatatgcaataggagattccaggtgcaggtcagaaataatctagaacatcatatcgtcctttggcgttctatttgtagcaaaatttgtttcatactagaaagtggttatcagggttagggagtggtcggcgctaaatatcgctattagtggtaccgtaggtcacatgactgtttataaccaagaaccgatatacagctggtcgccctataagcgtatatataaactaagtcttaggaaccaaagctagctcgtcaggatcctctagataacttctaaatatttaagtctccatctagttgcttataaagcattcgttcgtctctactatatctacaccgtcctttactaaactggaggtcgctgctagagcagtaattaatatcctcaaaaccatgcctgaattctcgaactccagaatagctgtcatcgggggcttgggtctttggaattatctccgacgctatcgtactactgaggttcgatttcatgattttatctgcttgaatattctctaaataatatttgaaataggatgtcgatttcctcatcactgttcaaggagcgcccaaagcagtcaaggacaggctgcttgctatgccatcgagtcagttccagcaacaggctcaactctttttttacaaaggagtgggcggcaagtcgattcaaattgacatcactcctgattggcaggtaagctcagtgaccggttttcattgcaaaacatatacttatggtttacagtctccctacgttccatccgccgcggtgccaatatcggcagctcgatcaaacgccttgccttatatttccgagattgatcttctcgtcttcaagatcaattgttgcggtttgcgacccacgccggccaagaagctacgtgatgcaaccgatgcaaggacattggcagaagatctgtgttccagaggatctattaatctcacgcctgctcaaaagagtgctgttctccagggcttagatgatgtagcccagctctccagaagagataagtcgtggtggatggcaaagttggcactgtaatagtggttgtctgagtatggctcgacgatgggtctgaatggaacaaagatcagcagcaatgatatgtaacggttgtaacctgcgaacggagtcttgctagcccaataaagagccgatatgctatggtaacgacaaagtggtccaatcagctggctgcatatttctgaaagcccgttggggatacgcacggacctaggacctaagtggagaaggatatacgtaaatattaaaaccacctgaattttccgcgctggctacacttccccctctcatttcctctccctgactttcgaacttggctaatattcctctcctcctgttaggccagcgggctatgtaggaacggccatatagatggatgggctacgtaggtatggccatgctttcctagatcgaagccttcgtgggtcgtgggcgagtgccaggtggggcccatggagcaacgccaagaggtaagcacgcgccctatagggacagccatggaggaaatccttgaggatctgcaaggctagaagcaatgcgcaaaggcgcaaatcttctttaaagctagagtttgagtaaaagcccatgttaacgtttatgtttttgcgcatgtaagagattacttataaaataaaaagccacaggtgcaaatctaatttgggtctttcttgacgaaaatgattgggagttccgaaacattctggggagcagaaaagggggttcttgcttggcggaaggtgctcaccgggtgataattcggccggtccgaaactgagcaattgtactccatacttgtaggagttgcgcctacagacttgcaaacttagtgcagcttcgcttcaacaccacaccccaattgtttgtgagtgccgaggtagttgagggactgctgtcacggcctaccgttgattctcaattaattgatgacagtctcttgatcagatcaaatgaactagtctaggagacataaaggcctacctaattctaagttcaacaaaggttagtggagaaacggaggtggtgatactgtagcaattaaaattcaagtatttaaatgttttaatatgaggccgttggaagtggtgagaaggtcgtttagacgttgtcctctctatagaaaagtcgagttgattgaatgattggttaaatgtggtcaacgtgaggttaaatgtggtcaacgtgaggaaaagcaatggcgggcggtgaaattgtgaccgaactacccgcccaagattggtcaggtattatagcataatcggcttaggaagcctacaacttgcaaattgagagaagttcaactcgcaaggtatattgcataatctgataaatttcataccagaaattgcttccctcctgttttcctaaatccccaagggtgcctgggcattaaacgctgcacgtgatgaatcaattattgctatttcagatagaccgcatgatggcaaacctaatcaagcctagcggcactctgaacgacattgagagagacactaacatcgtggtatcacttatctccatcgcaaaccctcgcgacaacaatagcattgtgggtggtttcctccaaaaatatatacggaggaaacaaatagagccaaaacacagttgtcgttccccgaacgacacagtctgcttattggtgctcctagggtattacctatcattccccggagctatacagtccactcccgcgagctggagatcccctgggaactatgacttgactcctagaaacgattaagagagtgcctaggagtcatgttatggattctgggattgcattcgatcccagaaaagtgagggtcccactcgcgagataaaaagtgggctctggtatgggtaattaataattagaatgtaaattaaaacgcgggctaagtgtaaagataccggttgaagagacattgtgttgatgaacaataaataacatgcaaccaacaattgtttgggagtcgaccggaagtacaatcaatattaatgacgccttccactataatcagtacagtagaataaacgagaataaacacatagtttgtaagacatcgacgagtagtacaaggcccatcgtggtgagaaacgaaggccaacgtttgcagctgttgattaaacgatcggttgttagaaatgtgagggttgaaacgaaattaaataattcattttctttttgagtaactgaaagaagtagggtgtttattaaatatcattggctagacaactgtctccactccaaatcagcgcattttcctaatacctaggcatcccccaagtctacagcaaagaaatcatttcacccaggttagagatgtcctgggcaagcccggtgccaagcctatttctgccatattttccaggcggcatataatagtttttcaaccttcacgagagcttctcattaattcgtgtactgacttttccatacctctagaagccactttgtctccaccacggttgaattacgtacccgataagctgactacacaggctatctactttcccctatcctcaggcctactaggagtcgtgaatgtcttcggaatttacagcgaactcttgagtaccctttggaaccacaaatcatcgtgctttaccctcaggacctcagtgacttcgaatccattgagataatgactgtttcaagtcatggaccgaggatatggcaaaaaataattgtttgcatagttctggtctggtggaagtttcgcttggtcgtacaacttcatgtatgttgttcaggttcaggtgtatctttatcaacctgctccagatcctgatctgttactagctttggggctggatagtagaggttggctttcccaaaaaatgggtcgaggagccggtcaataatattatactaacgcatcaagctgaggcctagttatgctagaattttcatttgtgacagctaaccgatgtgtaaacattgggtgtctccgacgagaaacggtcaactgcactgtggggttaaagcaacggatttttttattttttatttttttattttgtatttattgatttcacaattggcatccctcaaattcagtgggtaaagatctgattactcttctggactcggatttctgagccagctaattgtttaatcaccaactgcaagtctactcttagcctttgaccctcatgttctcaccactcatcggctaatcaatgacgtttcgtatattctactaatatcatggaaaacatcgttgaaagtacaaatttggccaactttctttctgttgcctagtattctatagccatcctgtgttcctaaatctgttgctctttccatctgaatctagaatatcggacatgggagtctgtattaccgaatttgggttagcgtcactctgaaccacaggaatagagacgctaagagaattaagcattagtgagtggtagccaacgatggctcagggaaattttgaggcatatgatgagaagttctttggctcaactttttgaggtcgatggatcttagggaagatgagtagatggttgatctaccatataagacatgtctccgttcagaagattatgcatacgtgctgatattccctcaattctaaaaaaaagtacggtctagagagtgggtacataaggataaggtattccattacatttagctcgcgtcccacttgatacggaataaaggatatttttcgcgggaatcagcaatgaagaatgagggcatgaatattgaagcttgtgtaaataccccaggggttatatccgccgcttcagatgcctcatgtttcaagtgatgataatgaaggtctttttttgatgtgagtggttatctcttcggcatttttgatagatttatgcgggctccttggttctatggtacaacgaagaataagggcgtatatattgaaatataaggcatctaatgcagtgtatctacacaagcttcaagtgatggtaatgaagctcctttttttggatgtgagtggttatctcttcggcatttttgatatatttctgcgggctccctgattctactagtacactttgccatcaacctgctcaaaactgctgatactgtcagagaccaccaggaccaagcaaggcttgtccctataaatacctcgtagacgtcggccctccaagtatttttttatctaatgatcattgcagattgtgtcaacgaacaaagttcagcgactcgtgcagagatcctattccttacaaggccttaactgcccagataagtcaggtacgtctttttactttcccatgaagtcccctggaatgattgtatgatgtctaaccgcatagcctagagcataccgaagcgtgttttgtcaaacagacggacagcgagaggtaagcttattctctctattttgaaagaatttcgctgactactagctttattgtgcaccttcctcacagcgaaatgacgtaacatagttgtcgttcgaagtaaacggctgccataggagggcagaatgagggcctcgcgaatgatgcaattgagattgtgatctcgctgtggtgactgtgcttgaagaggattttgcaggcgggccgaatttatatatgcactgacgaggcaaatctaggtgccatcgaaacagcgtatatttggaaacggaggctctgaatcaacggccaaagtgtctttatatgcctgaggcaccaatcgactctgcagtcaagggtgagtaagctggatccctccgtgacagtccgttcctctcgccaaacagcgggcggcctactctgttaacttcattcgattatctgctgaatacttctttcaacaaaggaccgaggaaacaatcgctgaattacgatgtcagcttgaagaataacaaaggctccgagaagcagcagagcacagccagggggaggaagaacggtgactccaacccacaccgtattggcattctcggtcgccgtcacatctctgtctagagcgagccgagttgagtcggatggaccctcacgactcagggcgaggcggccgacccagtgaaccgaactttgcccccagtgcatagtccctttgaaaccagagaaaatacaaattttggtgagtgctgcggcctcccttttgttcaggaagggatattatgtcatactttgagatgctaaaattaactagttagctaaccaatagaaacattgtgtcattttccgggaaatacttctaccggaaaccgtgatcggctgacgtcagcctcctggatcaagcatccaccagtcgagacctgtcgcgatcttctcaagctattttcccctccgacagatcgatggccgacaacaactccccagattacaaggctctctttctgcaggcggaaaagagacgcaaagaggccgaagagcgacagaagcaggccgaagatgaaggaagacgagagaaaaggaggcgggagcaagctgaagagcgcacccgaccgaccactttcgtggaattcttgcgccattcctacaacctgctctcccggccgttgagagttgagacaccatctcgctcgactaccgggaaaataccccttccgaccgggaaatattgcccaacacaattggaacactggaccgactgctcagcacagcagttagagctctacaagtccgtctacagctacattcagctgacaccagggggtgcgccacatttgttctcatctttgcatgaggtagaaggattaggccgacgactttgtcgtaagcctataagcagcgagcaagaactcgaggcctatgagcgatttaccgtggaagaacatgtccacaatataattaccgagttgtgcaaactacccgctgctcgcgacgagttcggtctcggcgatggaatccagttcagcaatcatatgaattccttaaacgagaacgaagctattgaagcggatatgagccaaccgtcaaatatacaccacccaagacctgatcagttctgcatccatcgtatcgacgacaactctaccactctcctcacatctatcgagtataagccgcctcacaagctctctgtcactacccttcgtataggcctccgaccaatagacttatggaaggatatggtccgatcaaacaaaatcccgacagaccaggaagcgaagctaaggtacaatgcggagcgacttgtctgctccgctcttgtccaggagtatcatgtgatgatccaggaagggctcgagtactcctacgtgaccaacgggattgcccgggtcctccttcgtgttccacacgatgatcatagcacgctttattacttcttatgtgatcctaacagcgaagtgagtgcagaagttgaagatagtttccaacaaccgaagacttctgtggccaggacactatgtctatgtctaatagcattccgctcactcgcacgcggtcaggaatagagaaattctatacgaccagagattcctatttggaagaccagttttaatcacactcgctctcacattcctacagcggagcttcagcaaacccttctccactccaatagcactattctggagtatacaagtccagattccggttcggcttatgaaccgtcgtcatccccaccgaattctccacaatcagcagctcgtcgactgtccactaggtctccggccagctgtgcaccgtcgggtgtacagcatcggtctcagtcgccggactcatcgggctcagattcgaacaaagcaacaagccgcaaacggggcttcagccaagttgcatcatccccatctgtccaacgagcaggtcgtcaacggcacccagggcaagatcgcgatacgaaattctgcacccaacgctgtttactcagattacagtctgggggtattctagacaactgttgtccgaatgtggtgcgccatcgtcgaagcaaagacgttcttcatcatccaattacctcagaagatttggtgcgtttactaaaggcacaactggacgaaaacattgacagatacacaccccttggaggttgcggggcttacggtgcgccgttcaaacttacatgtatcgtatatggctacactgttatcggaaaaggaactacgtcggggctgtggaaagatatctctcgcgaagcgcaagtataccaaattttgcgcaaggcccaagggtctgctatgcctgtatttctagggacgatcgacctggcaaaaatttatttccttcatagggctggagagattcgtcatatgctcgtgataggctagggaggcgaaagtacaacgtcaatagaactcacgcctatccttctccaggagatatataagtcgaacagagagatcaaagctttagaaatcatccacgaagaccttcggcgtgataatattctatggaacgaagagcttaggcgggcgttaatcatcgactttcaccgctctacgttaaagagtcgaccgactttacagcaaccacgagccgtaaaacgacgactatgtcaaccagagataggagatccaaaacgtcttcgtgtgacgtgaggcagtttgcttatttattagattagagcaatacaaatatacatgataatgaagcataaagcatttccggcccgcatccgcataaatcagtcagaatttctatctattataattcttgatgcccacttctccaacgcacctacatggcctctgatgatatatgattctatatgcgttgacaatcacgaattaatcatccaatttctggctctagacttaacttttgtatgataccatgaatcacataaaaaccttaattcaactataaagcttcaggaccgatattatagactgtcgtgtactaaccgaaaatattacaataagcgcccaaccgctcgacaacctcgaggaacgagattatccacataactttcccaggtatgctattagacatacattccatcagcaggcctctctctgccaaactcctttaaaaatttcttatttgattcagcggctaacttcaagtattcgtagttcacctggttgacgtcagctttagcgagagcgtgtgcaattgctgcgacgtttttgatctggttcatgattggtcagcaagtgagatgttcagtgccactcggatacccacctctcgtccatttagagctaaagactccaatcgtcgaagttcgtgctcctcaacaatggcaggtccttgtatcgtacatgccttagacagaaaagttgaccagagatctctacaaaactctctcgttaaattttcatactcaatgatcaaatggatccggctaagaattgcgtcatcaaactagataccccgatttgaagtcaagaaaagaattccttgataatattccagctttcggaggaaaatggtcacaaggcgattgtaggtgtcatggtaagatgtacactgctccataaacgcgtctgcctcatccaagagaagcacggcattaaagtatttggcgatcttaaatactgtttcaagttgtatctcaagcgcattagaatccccgtggttaacaacaagttcgcctacagatatctagaaaaatcagtgactctccaaaatcagccgagctggttggttcatacagaatagagggggagcttgaaatactccgaggttaccttaaccgtgaaagtctttccgactcccggtaggccactagcacaagttaggttaggaagtcttaatcttatagacgctttgccgatatacttcagaagaatgttaaatccctggcccttcctatcaattacatcgtcgaacggtaccgccggtatcatccctaggcaggttttcgccaataacaagaggatggtcttaatctctgaagggatctttaggcagtcgaacaacttaggtgaccaaaccacgtccctaagagcactaactacacactccactggaatcacattagccggaaccaaaccattgtcagtcgtatcacatacagaacattttctccttaaaactgaaacagcaaactgttgggcaggcaaccagtaaatcggcctcgctcagcttctgtgcatccacaccgtctcctcgcattttctccttctctcgctcacagccctccataagcattgcaccaatatcaaggactgcaattctatccttatctttgaccctaatgtcgcggagtgtcggtcaggagtagtttagctgcattttatggaaaaatgcagtatccactgccactcgactgttaatattaactttaatagccttccccttattcataaagaatgcgctgcctttacagtgccgaatgtgtaagccggccaaatcccgaaacttttgacccctctcaatcaagactttccggacttaatcgtgatttagatagtggtagagagggaaggcctcaagagtctcgatcggctttaacccccgaaactttgcaacacacagaaagattccggcctcaccgaacttgactccgtcataatcaaggaatcggcactcgagattcaaccacatctcgtcattttgtgtcatctcttcgcccgtatcgaatacgacacatcggggctcttttgtgccaatgcatatggtataaacatggcaaccaggcttaaaaagcgcctaaagaaggtcatatataatataaccgtgctgtaacattgattcgagacgctgcgagatataagcatatacgtgcttgaggtggtcgataagcaggcggagctctgcctacgccgattcatagtccgaactattgtccatattctccacacatctgtcgagctctaggaggaaatggaaaaggacggtttacttaatctaaaccaacgtcagcgatgttcttaggcattatattctatctcaattaccgatggcttatcgtccatcaggctaacggccttgatatcgtgcagcatatctcgtaggatatcgcgtaagccttccgacttgatatctataaatggcactacctcctcggacgtccggtctgatcatactattagtaggttttcggtatggcatacaaaggtgtcacataccaacacgttcacagacaacgaatgcatacttggcgtagtcatccaggtcattcctagtctccgttggctcggcaatcttatatttacatgcttctttgtcccagctaaacccgtgtcagctatctgaaaaagtggaagggacggttggctggtagctcatacgtttccataactgttttgaattgggattttgatacccatttctcaaacgacttgaaatcatccggtatagtacagatcggactctcgagattaatctcgcctaccgcctgaacattctcttcctgttcgttgctggcagaagaagaccgagcgggcttagttgccaaggagagttcagctgacgtacattcatcgtcggtgagcttgaccatcaaccgcttcagtcgaactatatcgagacctagtggggattggtcctgggagacaggagtgtttggaggttcttggtcggcaagatcgagcagcgcgttctcaagaaacgcactaaagagatgcatcagatccttcaaggtggcaggaggcatagtcgacaccttcgttgggctatcgggtggcgtcaagccttggtggcaggaggaggaagtgttcagtgccatgttgtgcaatttgaacgactagaagtatcggtgcggtatggggagctggtatgaagtggcccaagagactaactgtaatgccaatgatgaagaaaggtcaacaagaacctgagaaattgctccttcttatatgttcgatactccggacttctgtgtgtttttcttgggatacagaatctctatacttgcagctcaaggattgcttcccctcacgtattcggcgtttagctgcatagggctgtgcttcatggtgcatagcatatgaagtaaataccattctcaattggataggttcggaaatcattcagttggtggcgtcgcttttactacttctgtcctggatagacaaaatcgtaccctcgttcttaggaactaatagttttagaaccccataaaagtgagagggatccaagttagtagtctaccacttgagagaaaacttatgtaatggcttgtaactcggtatatctgccacccgagttaatccgactgacgtgggtccttgaggatcctctaacttcacgtgcaaggacctcaaaccaacacctgctcccaacaccatcagaactgctattcctacgtttggactatcgccatcttaacttgggagtctctgggatactacaacaacaactattgacgcacaaatacgcgatgcgttgcgctggccaccgttgacttgctgcccaatctgggtgtcataccccgcttctcttcaaataacggtacgaaaagtcgcaccaggaaagaggacgtcgaaaaaaaaatcccgttccccaaattgaacaacggtgctcagtttgctcgatattcacatttgcactatggcagttaagctcaccatcaaatccttattctacgttcttgactgacacgctttctcagaagggtgacgaagccctcgctgggcgcgaggaacggaatattgctagccatcgatttcctccggacccagaaaatgacagaacaatcaaatttcaaggactatacatatcggtattcaacgaagacacgcaggatcgaaaaacactcgaggagaacgtcgccgagtacaaaggtttcgcggttccgaagggctacacaacgtatgtaaggggagttgaaattgtctgctgggtagtttaggaggaaagtgcatgcttcacgccatatatgtcattcagcctatacccatcattgtgaccaacccagatagtgaacgatacgtcctgtgtttcgtcctttgggaaaagtgtagccacacaagctattgtcccgtacccgtgagacctttcccacttccacaacgcactgttttggactgcagcccgaaatggttgcggtagttgcatcaccatcgtacttggggcatttatgaacatgtgcttcatcactgtagagaatcagaatatatccggccacacaggcgatatgccatacctcggttttcatcatcggggttccgaggcgcagtttgaactacctggacgggcatgtcgtgatcggtgaactcattctactgggacggattctctagatctagctgagtgttagttccggaaatgctcctcgaagggtcgtcttaccatgcacaagctgctcaagaccgtagcacccctgaagttccccatctttcagtctagacagtgtttgacatactgcgtcaggccaattcttcctgtctcttagctcaatatcctctaccaggcagtcaaagatctcatttggcataaagcatggtccccatgtagttggaggataagcaatagcccaagagacaattccatccgggctaagttgttgaatcctagaacatcttttttggaccacacttctcctccattttgtatccttggaatcgaactcagattgcggcgacccgcggtagattaacttcatgttcctgcggaataccgctggattgcgcaaccgtcctccgctgagcactgtggcaattatagattgtgctttgagtctgtgaggctcactgtccttccatgcctgctccatccatgggcgcttccgtaatcctgtttttgattcgataaccacaatgatgtctttgaggtttgcagcgatctcttccaacgtttgcaggtcggtccctgacaaagaaatgtcacgcatcgctaagttcaaggcacccagatctctagcgatggagcttaattgattgatgatggcggccatggctaattttggatacggatgccgaggtttagtagtttgaatggtgaaagttggaagagtcaaagtattatgggccacagttttagagggtgtctaagtttatggctgtctaagtttgatgacgtgtaccgtagttgctggagccaatggagtgagtggtggcatagaggtagggttgtttgtgtagggtgacattttgggacttcagcagcggatcattatccctcaccaagaatatcgcccccaacctattatttcacgtgcccacatcacaatatcgcagcctggaatgataatgaggaagcctcacttaagaacgagctgcagatgcacgcacccttgtcgggcactagcctcttatgtttcctccggcgtgcgcccgagcgcatgccggaatctcaggctgcaaagccacgtcagcagaccaagcagccaaattgacttcgtccgtgtctttcagagtggctgcgcatggtgcaccaggatcatacttgcaggggtgctcctgagggtcctatcttcagcaactgaaatattagattagtgaccgtcattaccataactccgctgaatgccatacagcattttgctccattttaccccaaggtgtcgacaaatagtttctacatagcagagcagtttatgtagatactgttgaggttctaggagcaaacctctccactcctgagacttccaggtcctcgatccttgcgtaggaaaatgtgttttgctgaagttattaatatatgagcccttgccacggtatcggggatgctattccagtgcaccgaaggttagtacaactacagcagcccaatgattgagtcggttatgcctgaagctaccgtggagggtctgaagcatctctccattgtgcttgaaaaggctttgctttgcctgacctcaccaaccatgaacttctctggctaattatcagtcggtaaattccaagagtgtcataggcataagatctaaagagatctaaagctttaccgcttaaaccacggaaatcggggttatattcttatcgtggaagaatgtctggttctggtcctactcaccacctggaaaggcatgatcgtcggggattgcgggatcgattttttcattgtatagaagctctccagtctgggtagggtgtccagaattgacagattgagggtggtgctaaccagcaataacggcggggtccaagtcgcacgatccaaaaccgggggatcgatactcagcactcagacaaacattatcgggtattgtagcagaatcgatatcttcgatgctccgtagaccttccaactgcaaaaggtctttagagtcgaaagtctcgacgtgaggttggtaaaggtggtaaggctcaaatcctccggctcgtgtcgagtgggttgtgcgtcagaatgctggccaccatccaagcaaacctccaacggcgggcgggcaggaaggggatgccggccaggtttgtgggcatgacttttttgactcttggagacggggtcaataggattagagggaggcggggtgggagtcatcgagacaagacttgggtagcggcaaatatcaagagaatctctcagaggctgggctttgtcctgaaaaggattccatggccggaaggattccaggcgaaaactagcgtttgacatactgtgtggaagagatggctgagaaagtcttcaagatgtggtggaagtgggtttgaattacagttttgtcatttgagtggaaccgtagtctctttatagacggtcgcccgtgaggcggaatccgccttctacctagcgcagaaatcccgaccagcccctgcaatccaagccactgcattcaagaggcgggacaacaccagtttcacaaccacgggatgtagttcaccggcaacaattcccgctaccctcgctgatgacatttgcgacgtatgcccacactagtcgtcagcccgttctccattcggtatgtgacggtacgatcgtggcatggttctcgcggttgcagtccagcattggccgcatgatgcagcatctaccgaggtcaggcgagtgtgcgatattttcgctattggctcgcatcaccgtagcatgctttcgaggttcaccgattgggtgcggagagaccggagaggccgacgatgacgacagatgggaggtcgaggcactcgcgaacaagcggccgagtgtaaatctgcgacgctaagggctatgcaatgtaacctcaggtgggggcctgagatggggcggatgaagcggagcatgcagcatcgagaagacttcgcaacaaggggggtcagcgaaataacagacactcaacaggaaggcctcaccagcagaaagcaagcgatctagatggaattagagacttctttggaaaatggagtattgacacacacagtcgtgcgatacgatgcggtgaatggctggatcacctcagtgtttctgctcctgagcgactggatagcactgcagcctacgctggtcagaacgaccagggagtcggatcgagcggcatctctggtaaaatgaaagggggcagtgcgtcgggctgaaagcaaatgtgtagtagtgggtgggggccagagtaaaagaaagggggaggcgatgagtgcaagatagagaggcagaaaaatggaaaagtgagagagagaggaaaagagcagcgatgacgggtctttttaagtcggagagcactgaggggaggttacgtgacggcgtattggggcgctaaacccaaaaaagcaaaactaaccggatgcagtaattcacaggtccctatattacatactcaatatctttgaaagacctatagctagcacagccatatcttggaataaatccatgtatagttcatttcttttcaaatctacggagacaagcgcaagaatgtatacaaccatgtacaaaacccccctccatagaaacaatggcttatctctatgtagctttacatcttgtatttcagagcttgtcatgtggtgaaacgctaaaagaaacccacagcataacctccccgtcggccgtttaagcataaagtttgaatgtcgagctatgcacgagcgaaaatctcggccggttttgaaattgacccctagtatcatagtatatgcaagtaaggcgttctagttggtaagattgagtgagattgatgacagattcagcacacttgtgtcaaatgaggtaaggtctacttcgtataaggctgaagtatagtctgacgccccaccaagtacctatacatacttgcttattctgtcagcttcacttcatttccatttccttgaggctcttctgtccgacaagtgctaatgaagcattcggttttccatggagggcatctgagagtctgatatgtggttgatatatctttccaagggttttcttactacatgtgttacaatatgcctaatgtgtaagaatatatttggtatctgtgagtacaaaaagctcaggattctattcccctttcttccctccacaattgatggtgaagtatcaatgtaaaaagtgcggagtaaattaactgatggaaaaatatattccgcagaattaccccggatattgatcctttgcggggttagacgaactactactagtagatcgtctactcagagatctatatattctactacctagaagaagcatgccatgatatcctacgcaattctaccttcctttatgctagacctaccaatccaattgagtagcaaaaaatgattatcctgacgatatgcgtcctagccatcgcctttggcactattttcgccagagcaagtcctctgtcaagacccgccaaactcaactggtcatcgactaaggctctgtgagtatatctagcctaaatcttgcaagcagcactgaccccagaccaaagaatcgcctttggtgactcctacacctatgtccagggaaccatcggacaccaaaatttcagtttcattggcgaccaattcaacctcgcatatgatgccgaagccctgctttccaacaagatagtccaaaatcaagtaagcttatatcttgacacgattgaatcaaacacagcaccactcggatattaacgtcccacgtctagaccgcaaccgcagaaggcggtccgaactgggtcgaatatctcacaaactgcggcatccaccaaggcctcacctctccacaagactgcaaaaagcaactctgggatttcgcctttgcaggcgccgatatatcaaccgagtagtaagtacaagcacaagtacaatcaacacacattttcgagcaaactcaactaaaaaccaagcacaccaccacaccacaacttcacagtctccctcctagaccagataaaccaattcaagcaatatggccacccagccctcctaaacagtctaccaagcttcacccaagacaaaaccctagtcgccatctggatcggcatcaacgacataaacgacagcgccaagtacgtcgtgaacttcccaaccttctacaaaagcctcatagacacactcttcacatcagtggaaatcctctataacctgggctacagaaactatctcttcatgaacctgccgccgctagaccgcacgccagggaaccaagcaacgaaggatccgagtccgaattcaggtcgggtggtataatgccgcgttggctgatcatgcggctggatttgcggcgaagcataaagaggcgcgggttatgatttttgatgcgcatgcgaggctggcggctatgcttgatgagccctacaagtatggcattgttaatacgacgggcttctgtgctgggtatgatcagccggatattgcggttgcatatgagaagtatgggtgtccgacatcgttagagcggtatttctggtttgattcgggccatatgactagccatgtccatgaggttttggctggggaggtggaaagatggttgcaaggataatgaatggagataggcaatagctacatgcaagcacgttctcaggctgtctaccaataactttgacaagatcgagaaatacttggtggaatgtttgaagaataataataatcattattgcagattgaagtcagagacttcagcaaacgctgtcatgaaactttttaactaatcgacatgtatggactcatcgagagaactgatgaatcaagatccgagactgtgaaaaccccggaggatagagacggaacaaaaactaagtaaaacttatctatgacatcgaaaataacgccgtcctgcccgagttacgcatgaagtcaaaggaatgggaaagagtctaccgggatcgcacaatacaaggcaaagtggctgactgcacggggagcagcagcgaagcatctaccaacgacggttgccgccgacgggagcagagttggaggcagtgaaaccaccaccaccaccaccgccgccgcgaccaccaccccagccaccacggccaccaccacgtccacggccaccccagcgaccaccaccgccgccgccgccgaagcgaaccatctcggcaagacgggggtcaacctgctgcttagcttcagtgaggatagtgatcaagtcacgagcctgcttagagtctagagaaggggatgtcagtacaacttgcgaatgtccaaaacacggacgaaaacttactgtcagtggtgaagaaggtaatggcggtacccttggcaccggcacgagcagtacgaccaatacggtggacatagtcctccgagttgttggggtaatcatagttgagcacatgagtgatgtcgcgcacgtcttttcagaggaaattcgttagcaaatagaacattagtggaaatatgaggagtacggccatgaaggaccctttctccgtcgtgcaggacttgatgcatcactgctctcttgatgggtttctttgaagaaaatcccaagggaagcgaatccatgggatggcggtgttatcatatcctagagaaaccttggaaatgcagccttcaacagttcaacagttcaagaacaacgctgtgtgagagaaacttcgactcttctacgagcctgtcacacaagagatggagaatagagaatcaaagccaagctagaatgcttgctgctgtgctgcactgtgagtccaaggtactcttggcatgagaaccatttaggagaaccatttaggatgaccaaatacgcctggacgcggcgtatagacgccgacgtgcttcgagagagttgagcaccgtgccattgtattacacaacgtcaacacgggtgagtgttttcaagggccccttaaggggggacaagaaggggggaggggaagaggggggaggggtgtagtttgttcataccaataccacgcgaggccacgtcggtggccaccatgatggggcttttgccttgcttgaactcgttcaagacccagtcacgctcgttctgctgcttgtcaccgtggatggctggaatgtacgttagcaccgtacacatgtgtcaattgggaacccaaagaaaacttacaaagcgcgggccagccgtcctgacggaggaatcgggtaatctcatctgcgacacgcttggtacctgtgaaaatgatgcacttattggagcggtcctccataatcttctcaagatgcttgatcatcttgtcacgcttctcaaagtccgagacgacctcgacaatctgggtgatgcggtggttggcggagagatctgtggagccgacgttgacttgaatgtagtcgttgaggaaatcagaagcgagctgacggacatccttgggccaggtagcggaccacatgcaagtctgacgatcagggcgaatttggccgatgatcttgcgaatctggggttcgaaacccatatcaagcatacgatcagcctcgtcaagaacgaggtaagtgacgcgacgaaggttggtacggccagcctcgagcatatcaatcaggcgaccgggggtggcaatgcaaacctcaacaccgcgggagaggtcacgaatctgaggacccttggggacaccaccgtagacacaggtgttgcgaatacgggaggactttccgaacttggtaatctcagcctgaatctggacagccaactcacgagtaggagccaagaccaaaacaatgggtccatcgccgggggcgaggagaggctgagcgttgatgtgaacaatagcggggagacagtaactcagagtcttgccggaaccagtctcggcaataccgacgacatcgcgtccggacagagccatgggccagccctgggactggatagcagtaggagcgtcaaagccctgagccttgacctcagacaaaacgtacgcggggaaaccagcctcgtcgaaggtttcaacgggacggggcacattggtaccctgaatagccatctccttctccttgcggaaggcgataatgtcttcctccgagcgcgcagtgacatcggggtgctccttgtagaatgacttctcaaacttgggcatggtgttgggatctaagtggaaccaaagttagtattgcgtcaacaaacacgcctgtcattggaatcaacttaccccagtcctgagtcttcaggccggcgccgaggttgttcatgcggtcaccaccggcagcaccgccgtaaccaccaccaccaccaccaccgtagccgccgccaccgctgtaaccacctccacggccaccgccgtaaccaccaccgccgccgctgtaaccaccaccaccggagccaccgttagagtagccgctgtcacctccgcgagagctagaatagcaaagttaggacgaattcttctgcgatatgcgaggtctctttggtattggttgggagaccacgataggaatcccagtgcccaacgtcataacaaacaactgcaggatcaaggcctttgccagaaaaccgtgcagttgatgagatagacaaagaagacaaagaaaagtctcgatgagaatgaacttaccggtaggagtcaccgccgccgccgccaccgcgagagtagccacctccgtacgacatgattaagtctgcgaagggttgattttagggagagagagtgattagaatccgaggggaagtatgaagtaggaagagaagagaaagagagacgagttcacaagaaaaggtaggaaaaggttgggaacttgaatgaaaaggaaggagaaaaaataaaaaaaaaactgccagggaggaaggcgcgaggaaaaattagattaggcttagcgccctttgtgttttccttggtatcatcacatgaccaggtctggagcaggtgcctcccagaccgcctgcctaaaaagggcttagtcatgactcgccgctttcgtcgcgtctgtctatcttgcttcttattggttgttgttatcgacttcaggcagaaaatttagaaattataagattcaccatggataccaagggggcaaataagtcttgagtggcgataatgtttgacggcaaagtgaggattttcgaaaacaaatagactgagagtctatagataactatttgataatgcatagcagcatgaaatatcactagagaaaacatatcatatgagcgaaaaaaagaactatgggtaaccgaagtgagacgaatagcgtcttgccctatcgtcttgaatcggagcgcgattatcttgcctgggaatagaagtccgcacgtcagtcacctccggattctgaccttcgagcccttgcaatctacttcaaacagttcatagcctgaaaatgctctcagctgaatctagctggacgcccaatttttatttccatagttccaaggtttcactaatatctccatcaatggcaagaaacgtgagaatgtattgtttatgacagatgaaatggaatagacaatggaatatccggacttagatggagtgatcgcagcaactcgtaaattgaacgaggtgtagatagcagcctgagatcttaaatcctattgctcctcacctccgaggcccatatcccagaaacgaatctccaattccgtagctcgaacaaagatcttaatcaattcttccatgcgactgggtgacacacgctgcatgtgatcctctagcaatgctatgacatgaaatgagtcagtgagatgttccactcgttcttcacgatctgacttacctgaacctagtcgcacagcctccgtatagtcgtcggcaacataattctcgatccatttccagtacgtgttccccactcgaagagttttctccgccgtatgcaatcgtcttgcaatggcgccgtatccgatcaagcatggtgcgagagccatttggagagccagccagtcctccgactggcctacatccaaaatgtatcggctgtatgcggtgcaagctatacatatcgagattagtacatctgtcgagtttgtaaaaaggcacgatcggcctaccgatagtttcgggtgtatcttccatctcctgcttggaaagaccaaatgaggcacagtagtcgatgtgcaatgccatttcccgctggatgtggaggacaatttgggccgactggagggattgtatcagattgtccttgaaagcaagtatggtgagcacttaccgctgctattgaatctatgctcttggccttgtatgatgcaagtgcattgcttcgggcaaattgtacctacaggttgaatcatgataagttgaatgccttcttccaaccggattgaagatggctgtctcaccaggtagagataatcttgcacaagatacgccttgaagcgtgcaattggcagtgtgccctggcccatgccctcgacaaactcatggtgggtgaattgccgccatacttgctgcacatcttgacgatccaagatgtattcaataaatcggccgctgaatatcatatcgttaggacttagagaatcaaaagatctagggaatgggtcacatacggcgcaaagggcatagtgtatgtggagtggaaatgattgatcggcccgctcccttgacctaggtcaatgctcgtcttgatccctatctcaacgaatcgcacggcgcttcggaccgctctgatcatgtctttaccggaagccaggtttgcagcaattgccgacgcaagtgagcagcccgtaccgtgggtatttttggatgctaagaactcagtctcaaataaggtggttgtcgtcccatcaaagaggatatccacgactaaagttacttctttcgggtcttgagatgtcttgagatatttcgtcaaaggaaggtgacctcccttgaggaggaccgccttggggcccaatgagcaaaccttcttagcaagatcaaccattccctctaggtcctttggttcggaggtctctgctccggcatctttcaacaagagaagagcctccgggatatttggtgtcagaattgtggtcaaaggaagcaactttgtccgtaattccttgactgccttttcaggtagcaactgagagccactagtggaaaccatgacctgttgatgcctgttagagtgacaatttgagaacaggacattgagcataccggatctagaacaactacaggaactttgtgagcttgtagtgtttctgcgatgacatcaatggtctcagcagaggagagcatgcctagggggtcataggtcatcagtggcagttctagatggaaaaccacgaatcatgaaacgcaaatgacttacccagtttcactacatcggcaccaacatcttctagtccagcattgatttgctttctcacaaattccgaggggacgacaaagatgtcttgcacacctagtgtgttctgtgccgtcaacccagtggtggcagtgagagcatagcatccatgggccgcaaggaccctttgatcagcttcgagaccactggaacttgttagagctttgttctaaatcatgatatagcgtaaatgatagggatacaaggtcaagtatcgctttggagataagttgatggggtacctcatttttttttttctaaccggtttttgcgagaggatatttagacttacgctccgcctgaactgtccgatcctgcaatgaccaaaacccttttgacagacatgattgaaagagccggccagaaattgagaaggatatctatctgctctgcaatggatcaagctgaagtgaagaatgacggagtggggtgggcatccatcatgagaattgggggtggggtgcttaagtaacgataagacagatagatcttgatatggatgaaatattaaacgtccactcgagacatttgtagaccctaaaatatgcaattcgatttaatcatgactatgctaaacttccagaccccaatatccttagatatttacaaacacccaaaatcatacgccgtcggggcatctattgtaacatgaagcggaagagaccatccatctcaacccattgacgaccacacttcttcaggtagctatctaccacccccttgatcgtaccgaatcttgtgcgattgaactctgcaagggcggcaacactgtccttcttttctcctgtctctttctcggcagcgaccttagctttttcgacatcccagagaccggcaaagtagagaagctggttgtatacctctttctccgagtactcgtacgacatgcgacctagacagccttctgcacgacctcggggacccaagcagcggtgtccataaacgctgatttgccgtgtgcgattgccacatgacgaatcgtcacagaccaaccagccttcatagtatcgcgaagtctgttggcggatttggttctccacttgggcgacaattgtcataaccgagaagggtttctggcagctctggttcggacaaacgattccgtgcgcagtgcacatgtgcgatgaggtcaccagaccctcatacacagattgttctttgcagtatcggcatattagggacagtcgcgtagaattggcaaaccgaaccgagtccgggatctgggactcgagcggggtgacctcggcgttttgctgactgttggaactggaggtattgatctgatatttgcgagtatcaagacccaagcactcggcaagacgaacggcatcggtgccaggaattggggcgcagagacgctcaattggagggaatatttgcttgagcatgtagaactcaacatctggcttgagccctgaatcgggcttcagcacatcctgcggggtgtatgatcgcttcgcaggagggagagatgaggtttcagagtctccgttggtcacaatatacgagatgacgtcgttcggtctaactgtcttgccccgggcaatttcgcggagagcgacttgtgccggtggcatgctctctttattagggtactcctggggtcgttttgaaagtttctgatagagcgttagcaaggtgatccagaaaattcttcaggttcatcacatacggtgtatatcacgtatttctgcaccgggattttatattccttcatcctgtctgcaagctcacgcaagtactcgtgaatgttgttgagaacgatttcctgatcttcaccggacaagatttcgttgagtagctttgatgatacctcctttgagagggcacagtattcacgacgcttcatgtcaagacccttgacctcaagtttctccacgtacttgccatccacctcggtaaggttgatagcagcgtacttcttcttggcatgtagtagaagccgacggaagatattgtcgatatcgatttctagaagtcggtaacgttcgttgaccgatttcttgaactcttcgccaaccttgagggcgtcactcatgttgtccatattcgtattgatcatgaccgaatcggtgtcaccataaatgactcgcaattgctggctttcggccaattccttggtgtttctcagaatttcacgtcccttaaaagtggtgagcattgccaaaggacgagcgtaaaatcgactctgtgtgtatcccaagcatccgtacatggaattggcagtcagcttcaatgccaattgttttgtgtcccatatggccagttgttcgggtgtggcacgcttgtctttcatcaacttcttcacttcgcgtcgacgactaaccaacgtcgcgatcaaccgaggtagaacgccttgttcttggtcaggggaggggacatctggcactttttcttcattctcattctcggcctagttgcaaatgttagaaatagaggaaacaagactaggggttggttgggttaatttaccgtagctgttcggtccactgttgtgaagcagatgttgtattcctgaataatactgggatacagactgttgaagtccataacaaggacgaagcggtcgtaaagacctttttcgggctcgaaaacaagaccgcccttgaatttgtccttctttttcttgtcgaccacctcatcatcgtcgccatcttgtattttctcctctgccttctgaagacgagacgagtacttgtccggacagatgtatttgttgcgatgaaactcatgtaacaaaatatactcgttgcgctcggcacgcgtaccgctaagtgtgcgtgcccacgaattacccgcggtattggttaggaccttcgtaagtggcagcatctgaagacgtaaaaccaatgccgcaatgaagtatgtatctgtatcacaatgattgacaaaattcatgagaccttctttggtggtcgcccaggttttcagtgccgcttcggcatccagttcctggcgtacattgccttgaccgaggtagagttggcacatctcagtcaaactccatgattgacatttcatcataagagactagtagctgtcagcattgtgatgtacccactttgaggagaaaattaccttgcccatgtcattggcaacatcacacatcaatcttccagcaatcaactgtctttcggcgaagaagttgccacccttgttgaaattcttaggccaatctccacgcctgagtcggccaatacgatgccatccaggcgtcttcttttcccgcatccggctgagtagaatgcccaggtcgacatcctgcaactgatggcccatgatcacatcggggtccatcttctcgaacatagccaggaatttactgagcaagaactgttcgcttttttcaagaatgacagttccttgctgatttcgtgcttcggcttcaaaatgcattgggtatgatccaccagcagggcgcatgacggtgaatgtcttgcacggaagcttctctggtggagtggtatcagtcagagaaacgtcttcatacacccgggcacttgctattagaatctcctgcttgttctccttgacattgagctgggtacggaaagaaagactcattaaggtcaagggcggggcatccaggttctcggaatctgggacgaggctgatgagagctggtttggtggcctggcattcgaacttgcaccaggatgcattggttactgcagcaaagtctgcctgatcgatcttgagccagcaagggcccattatatttttccagagaacaaactgttcaaacagggaggtattggtaccgaaaacgtttgagaaagtctctcccttagtttccattggcagtgcagccttatcgtaggggtagagtaatttgagatactccgcttcctttgggaccccgggcatttcaaatgcgtacttccgttcgcacggtttcatcttgtgcatgccgactttcagtcttgacatcatctcgtcgacctctgagtaaacatcttgcatgtcaacctcctcttccgtcgctcgtccttgcttgtatcgatattcacgcggcaggaaatagagctttcgcaagatattgtcaatcttaacgaatgcactggtgtatgatccattctgcttgttcttcacttttccgaacagacacaagctgccgttgacttccgtgtagtccagccagaatatgcgcagactgccgtcctcttcgacaacatcctgggcgcgcagctttccaaatgatcgcatttccggagctggactactgaggacgttcaatttgctcctcacgtcattccaagaagcatccattacttctgccattgacttgactggggacgagcttgctggtgtaggagcaatttcacgcttgatcttcgggggcggtcgactgccggtcatgttgatagtcttcgttttaaggctagagtctccagtgacttctgcgacgtccatgaggtcaacatcatcgtcttctggctcttcggccttgaccggtacagtgttcctccgttccaccgctttaataatcggagacgagggcagtatatcgctcatgggaacgtcatcatcgtctgccatcggtagagggccgtcatcgagatcgtcagagtggagtgccgggtccttcattggcgagcttggaatgtgattttcgtcttttgcgtgaagcttctcgcggcgacgcttctcagacagaggcggggagagaacgcggactttgcgtcgggcttctgatttgacaatgtttcgtgtcggggcgtgattcgatacgacattggtgtcgacctctccgagaagatcggccatgaatgcatcgtcctcggcagtagcagcgggcttgtaaaacacttgtcaaaataaggtggttggattccacgagcaaaaagcactcaccttgggtttgggaacagaagccgcagcctgtcctttgttgaagtacttggatatgccattgttaattttctcctttcgctgttgttcctcttctctctttcgtttggcagccttgccccgtgtaggtagttcgtcgctctcgtcactgtcatattctgctgtctgttcgttccatacctcgcggccatcgtccgcgtaacccgcaccgttatcatcgacgacaaaatcatcctgatcaagacgatttcggatgacctttttgtagccatcatcatcaacctcgtcgtagatatcgccctggtcctcaacctcgtatgtggaaagtcgtttctttcctgaggcacggagggccctcagctcggccaacctttcgcgggctgtaggcattatggtttcttcaggaatcactacccattaaactgagttgggtgcctaaataaaagtagattgaattgacgattgttgcggggaaagggaggatgaaaggagtgccgcgccattcatccaggcacgcgaacaccacgcgtcaggtcgcgtttgccctagttaaaggtaaagtttgccggtgagattatgtcagcaccgtaagtgtttctgcctcaggtgatcctagtaattacatcagccattgaatgccttaggcgaacatacccgccctgaggcgatcatatcgtgccctaatatctaagtttaatgattcgcgcaagataggcttcaacatcagaggtggccaggtcatctttccctctttagatttatggtatcaaatttattggaatatatgatgcaaacatacattttaattaccacatgtcattagactataattggctcggatagaggcatatggctgtctatgtgttttgaaacccagccaaaaagcccaaagagaggaaaatatttgcttgtgaagggcgtagttactctatgaatgaataagagactactatgataaaggaataagccaccagtagtataagcctgatatccagggccatcaatatacatacatagtaggtacaatgattaccctactcataatttgatacagctgattcttataacaagtgacctcttgattggcattactaattgacaacagatagttaggtctgaggtacactcagatggtcaatcgatctctcaatgtgatgcatgcaatagtcactaagaccataatattcacagaccgcgatattggcaatctacacctcggcgtccttctgttgtaatcatgatttctcaggtgatgagctacctgcgttttctgcatggccgtactataggtcgctatgttcgtaagtcgctatggccgtattataagtcgctatggccgtaagtcgctatggccgtattataagtcgctatggccgtattataagtcgctatggccgtattataagtcgccatggccgtaagtcgctatggccgtactataagtcgccccggcgatgtaataatttatatttaaaccacagttcggtccctttactactttctctttcatgttttttcctctcctacttctctggctatctttctgtcgctgtgagactatacttctttgatcttcttaccctcgagaggtgttccaggttcagagtccgctgtcatttttctcagctctcacagcatgccggtgagttcaaattgttctctttccatctagtgatttctttgtttctagttcactagtcgctgtggtgtttcatccaccccgtcgcatcatggctcgtttaccagtcacgtccacgaactatgggttgcccagcagaacacatcaagttacaagacacgacttgttagaaaggactttggtaagtcttctaccttgcagtatgccggtgaaaaattctaactggtctcctttgcttcggtaccatgcatgtcgcttccatctatcactccaacgagccatggcttggccatcagaacatagcaccctttatgagacagggagcacatggaatagattttgatgagcattctactcacttgccacgattaaattaatttgactaattctcaatgcagggcatccctcaataccgtcagcaaaattcccacacacgtggcagctgggtatgtacgatggacagacagaattgagctgtttatttgatgtaatgtgacaacttccatttctcgtccaatggcattggcatcccgcaaaatgatgacagttactcactacacagagctccctagtctttactctaagtatggactttgaggacaagaggtgacaagaacagtctgatgcgagactaactatctatctaggtcgcttttcgtatcgctttttgtacttcttactcctcactctttataggaactttatgatagcgactcggctattcaaactgcggacgcgttgatggatttgccaattggatcaaggtatgtcctaacccgtttttgtctaatgatagtcgcaaaatgatgagaattcttactacacaatatggagctccctagtctacggactttgaggacaggaatgaatagaactctgatgcgagactaattaccccaatcaactacctaggtcagatttcgcacttcttgctcctcactctttgtgggagccactcgactcgagctacggggccaatgtgcccgaaagcgaactctcgatgaaactgaaaggatcaagccgatctgggtcaagataaaacagtacttggtttgatccaactgtttgtactatggaataatgttcgaatatttttgctaacactctcaagaacctaggtgtgtattccattttcacttctcgatatgaacctcctctcattacacaagcaaatgaatattgggctcgatgaacccgaaagcgcatgttatgatgagaatatactatggaagtgaccgtgcctcgccaaatgactttccaactggcttacatggtcattcaaggggtcactggacacggtgaaaaggaagataaggactctgataccatgcgagacacaggatattgctttcctggctgatattatggcccttcttgatctgttttgatattggaaacttctgctaataatcttgagatcttctaggtttccatactgcttccaaccccacaagcacaattgatactcggtgccacagaaaggccatttcatgatggttaaaaaatattacactttgagggaacgtggaccctcggagccaatggactcagtgataagtttgaagcacatctgatacaaggcgaaaataagtatatcatttccctgactgatcttgcacatcttctgcacttgctacgttttcttttcttttcttttttttttcttttgacactcgtgatatctagattatcccataattactttcgggtgagactcaatatggctccaatggattcctagcagaatgagcatctgaagtatcggtcaatgaggactactacccaatttgaagatgacgatgaccccgagttttcgagagatcaacggacgcaatcaaaggttgagattgaacactggtatgagttgaataaacaaaaacacttgactttcatgactgacccgtctgtcgttgtgatccaattccacattgggtcttctagttcacactttcagatcaaaggatttcgtctctcttattccttttccatgtaaactgtatggcttgatacaagtaccccgaggattcgaagactagtatctaggggatttgaacatccacggctttcaatggtccgaggggctacagcaacctgcctgagacgcgacaaatcaaaggcttgattcggactaagccgctggaaattctgttttccttgttcgatcccaactccgtgtgttggtatgcagctctctggctggtatgggacgaagatcgacattttcagagtatggcacaatccttctcacgttgatattggaatctctcgactaattgttccgatgtaccactttagattgccaatcacccattcaggtatgacctgacacattcttttttcatctaatggcaattgaaactcgcacatgatgacgatttatcactacacagagcaccttagtctatactctcactatggactttgaggacaagaaatgagaagaacagtctgatgcgagactaattgctcctcactctttataggaactttgtgggagcgactcgacatagtcgtacacacggcggatacattgatggattgctggttctggatcaaggtatgacctgacccttttttctccaacgatgatcgcaaaatgatgacaatttctcactacactatgagctccctagtctacagactttgaggacaagaggtgataagaacagtctgatgcgagactaactacctatctaggtcgctttttgtacttcttactcctcactctttataggaactttatgatagcgactcggctattcaaactgcggacgcgttgatggatttgccaattggatcaaggtatgacctgatataccccgtttttgtctaatgataatcgcaagatgatgagaattcttactacacaatatggagctccctagtctacggactttgaggacagcaatgaaaagaactctgatgcgagactaattgctcctcactctttataggaactttgtgggagtaacccactacggacacattgatggattgctgattttggatcaaggtatgacccgatatgtccctttctttttgtctaatgataaccgcaaaatgatgacaatctctcactacactatgagctccctagtctacggactttgaggacaagaggtgattagaacagtctgatgcgagactaattacccatctaggtcgatctgcacacttcataggaactttctacagacacattgatggattgctgattttggatcaaggtaagtcctaacccttttttgtctaatgataatcgcaaaatgatgagaattcttactacacaaattagagcttcctagtctatacggactttgaggacaggaatgaatagaactctgatgcgagactaactacctatctaggtcggtttacacacttcctcctcctcactctttataggaacttagtcgtgcatactgcgcacacattggtggattggcaattttggatcaaggtaagtcctaccccttttttgtctaatgataatcgcaaaatgatgagaattattactacacaaattagagcttcctagtctatacggactttgaggacagaaatggtaagaactctgatgcgagacttattaccacattcaattacctaggtcgatttgcgcacttcttgctcctcactctttgtgggagcgactcgacatagtcgtgtagtgactatggatgagtgcaaagctcgcgaatgatgaccttttatgtcttctttatttggtgacttgctttggcaagacaacaagtagagaaggcatacctgacgcgaggacgaatatcaagagaggtaagttttccccctgtcacattttcattaacaattggatactttaacgtttttcgagcagtttgaaagctcgcgaatgatgaccttctatgtcttctttatttgatgacttgaatgcatacctgacgcgaggacgatcaagagaggtgaggtttttatccccctatgcttcatggcaacattttcgatcagtatgttttgacaatatcgagacataaggagagaggtaagtttcctattcccctgttcgttgaccatgatcttttaaaggaatatccctactctcatcatcggatggcaccacacttatacttcagtggtggtcgaggcaaggcaagtcttccattccctcatttttatggacgttaacagttagttttgagagaacctttccaagtggatcaaccttcaaactcccaaatgatgaccgtttatcccttcatttcgaagattggcatgagccccaatcaaaacgaaaaaaacttctgatgggagctacacaaggtttccactacagaggattgatctctcgaaagatatgtcgacaacttccctatatcttggctgcagtgcagttctatatctcaaatgcgaagacgcctgtgcttcaagcgcgattgaaatgaacaaaggcaagttttcccttcccctgcatttctgtaaatgctgatttcgggctttaaatgaacacacgtctagaggatgaatctatcaagtgagtgagcctcgaaactcatatatgatgactgctgaattgttcaattgagtcgctatgtcgaatgcatagataggtattggcattaacgagaagccagatctcgacatagggtttactgagaaggtacgttgggaatccccttatgctggtcgaacctgatgacattttcaatagtatcccaagtggctgagccttggaactctcaaatgatgactttaacgttcttattccgtccaagtgactgcattggcaggcatcagtgaaagacaaaaaaaaatctgatgagagttcaatacaaggtcgagtcgcatagcactttaagtgggtaatcccttgacctacagatgatgagcttacaccgatcatatgccttcctacagaatattaccccaacggggaaagagaagaatttctgattaagagaaagcgagagttggccaggagaagacattgcaattcgcctactttggtgatgactgagtcttgtatactccggatgaaaatgtaagctcacattgatgcgtatcaacgatgacgcaagacaatatctgactgatatctagtcccgggctgctttcttgatactggcgaagagttattggagaggttgaggagcatttcaagaggagttgttgcgggaaatgtcgaaagagagccgcggcactggctgtgagtgccagcaattcttttttcatgtatgcatggattcatgttgctcacaccatctggctacgacatggaattgaaataatgtccaattgaactgaggtttggcggtaaatccgagtgacagatagccaatgtccggggtaaacttgttgtaagtatgtaaagccatgaattctatgtggtccagtatgggagagcgaggtgcgaggacctcggtggtttaccttcaaaagcagatacttgccaagttggcgtatggagaacataaatctgggaaaaataagaccaatgttgttagaacactatagccaaaagattccaaaacaaaggcttgaacaagataaaacccagtatcattgagtagattttcctggctatgctaggtatttttttccagccgtgcaggacagcgccagtgaaaaacatatcaacaaggcaccggaacaacaaccagaggttattttcccaaattcctctagcccggtcctcagatctcttgcaagagcggttaaaccgaacaaaaaccgctcaaacatccccgaatcctcccaagtccccagtccaccaagaagtcatggaaacaagtcgtgatggaaaaaacatatgaagacagacatattccatttccccgttgccgtaaacttttctttcccttttcgccgcgtaacaagtgaggaagaaaaatttaacggtaggacttctggtaacgggagcgggcaccgcgaccaccgaacttcttgggctcggcgcgacggttatcggcaaccaggagtgtgcggtcgtactgagcaagagcctgcttcagctggttcttggagtgctcatcgacgtacttctggtagtaggcgacaatggacttggcgatagcctgacggatggcgtagacctgcgaggtgtgaccaccaccggtaacgcggacacggatgtcgacaccggcgaacttgtcaacgccgacgatgaggaggggctcgtagacctaaaatttcgagggtgaattgtcagaaaccgagttcgtagacgttttcccattgccattgtcgcttgcgattcgtgcgaatcttttcgtttgtggcgcacgggaggtggttgagcgaatgtattgtgcgtaccttgaaacggaggatctcgggctggaccagggagaggggctggccgttaaccttgacgaggcccttgccttgctgtaaaaagtctcagcgtgttgtccaattcaatgtgtataagacccccatgatcgcgcaacatgttgtttcgtatatcattccaaaattcaaccccagttcttcgtttcgtgcacgattcctttccgacaatttcctttccagacatttcgaaacaacgtattgggaccgagagagtagaggcgttcatcataccttgcagtgggcgacagcggtggctattgaaaacgaaatatgtcagcgcacgggttcattcactctggtctccggtcgaaaaaaagagagcttacccgtcttcttcttgccgaagcattgcacactcgggacggaagccatggtggattgtcgtgggggagggagtgtgttgtcgagggagatggaaaaagagtcacttgaattcccatacacagtgatttgcccttccgtgcgggtttcgcttagtgtgcgacgctaattctactttgggactagcgtggcacgagacttagggcttggtcacatgaccggagaacttcaatcggggcgggttagaggctacaagcaatacagggaacgctgagatcatcattatctctgacatttaagcgctgagtctgttttggttgctgggatcttcaattgaacgactccgcctttcattaattgtctaattgtccatcgccccggcatatacaccaccctccgccgcgtcaacaagatgtcgcaactcgtcggcaaggtaaatagtttcaatgcggagccttccgggccaaccgcgcatgccctgaactcaagcaagcaactcgattctaaccagtaacgcatcagactcgtctcgcctactcgcgtacatggcactatgtcgacgccggcaccgatgaacgatccctcggccgcctcgcctcgtcgatcgccctcgtcttgatgggcaagaacaagccgatcttcgacccttcaacagactgtggtgactatgtggtggttgtgggatgtcatgatctcaagacaacaggaaagaaacgattccagaagaagtactacacgcacacgacacggcccggtagcttgaagagcatgacgatggatcagatgtttgccaaatggggtggtggtgaagtcctgcgccgcgctgtcaggggcatgctgcctaagaaccgactgaaggatgcccgccttgctcgattgaagagtaagttctagatttttatgctcctgctccttggatgggttgcttgattggtggagatacgcacgggttcatcttcgaagaacaacggggacactatccatttagccgatctacttcttcacgttttgacccagtctaacccaatgtcgtgcagctttcgaaggtgtggcccacccctacaaggaaaatattgtcaagttcggcaaccaatcgatgatcggaaatctgcccgaagtgcaggaagcattcaaagaagccgccgaaaagccaagcgcataaagcacccttttttatctctccttgtttcgttattttagagcgccgacctaaaccgggtccgtgtctacctgtattctattctcctgcgatgttatgatccaaccgcacaagcgcatgggtgtggagtccatttgggatattgcttttgattatctactctgttggcctcggacttttcaactttcgagcctgcggttcttttgaaatgtacttatagcacatacaatcacaataccacgtactatacaatgcttttttaccttatcttttgcgatgttgtgacggattggattcgagatataaagagtctgatcccagaagtataggaaatggatatatgtacaaaatagaaaagaaacccaagctagcgcccatgtcggagctcgccgacaatcctttagaaagcatttacagcttagcctttgggccagcgcggccaacggtgcacttgataagaccgttggggttggattggggggcgtacaccgaggcatccttgccggtgttcttgatacccttgtgccagctgagatctacaagcgcagaggttagcccaaatccaagattcacaggggagggggtcaaacataccaacttcgaagaagtggatattaggcaacgcatagtcaacagtctccaagagaggctcaacagcaagaatctgctctcccatcttgtacatagtcgcctggacggaggcactgttatcctcagcaaaggtcttgagggtaatagcgcgggccgcctcccaagcagcattgaacttctcaacgtgtgtcttgacatcggcaagaccagcgaagcggcgccactgccagtccgcggcgacatcagtgctgaggagacggtcccaggtctccttgagggtcgtgtattcgtcgcggacgaaaccccagaactgggaaccggtgctcttcagcacggtcaggcctctgatagagcttttgatgtcgatgccctttccttcgatgacgtcgacttgcacgttgcgcgtctcggagccaggcttgataaacgagtgcgggtgtggcttgccgtcgatctccatgcgtacccagcggtgggtaacgatgttaacgtgcgccgcgtggatgtggctgtacttctcgatgaagtgtgtgcccaggatcgagccgaacagctccggtggggatacggggttctgcttggctgtgatgaagacggtgttcttgattgagtcggttgcgacaacgacgctgttatcggccttggtgtaactgtggggaccttcaggttagcttcaactttttttctctcgataaaagatgtcgattgacatacgaggtctcgatgtcgccctccagcaggacgcatacggtcatctccacgaccgtctggatgccggtcttctcatcgcggtccaccttgcacacgcggacattgtccttgccgtagcgagcagctgccaatacgctcatcttgaattttgggagggtaacttgggaatatggaagagaagaagaagtagagtgtgaaagttaaatgattgtattacccagcagacctgatcagtatttatctggaatgcatattggctgatccagagagcatcgggcacctccgatggccgcgatggccgcgagtggccgcgatctcctccaaatcccgatcttatcagttggcgattggacagttcattttcttcctacctttatgtagctatggcctgatgcttctatgccattctcacctatcaccatcatatgttgtaccgaaggagaagaaaaagacaatttcctttcccccagactttcgggccacgagccgagtgcagtgacagtggagatctcacattcccaatcccgaacttccgaccactctgcggacttcaactgcaaatgcctagattattttcaaatccctaacatctctaacatccctaacgttctgtataccatccggagacctccactgcggaccggcgagctgcgagccgtgaaagacgaagttccggcgataaacactcagcgctgacatgatattcttcctctgttgacaattgccataataggcatgcgcagtgacctcactgtcggtggtacagtgcggggagaaatatggcacagtctgtacgttgactcgccttgatgacgagatatcgtggcatttttgttctcttttgttcatttaagtactttgtacggaatacaccgaaggtatttcatggttaatgctgtcctacttcaatcgtccagggtagcttgtatatataacctccgtggtgtataccaggttgctcatgcaatttctatcagaggcaatatatatcttcagaggtagtatatatccccccagacaacctacacgtacaaacaccattagagcgcttatttccgatgaacagccggagttaacactgaagtctctccaagactcggcatgaaagagcctcaatacccacagagcacaaaagagtacctatacatacaccgcataggggaaatgcgtggcctacgcctcctgtcacagcatgtgcaagtgtcaagcacactgacctatctagcggtcaacgatgattgccatgagggatttgatttgcttctatatgagtgacaatattacccgaggtcatcatgtgctcaaccttgctgccaacgctccgaccaaagccaagtttcatctctagacagggaataatcaagatatttaactatgcagtctctctcgtacatcctagaccccaatatatgtccaatcctcaacacccatgcccagaacgacagcatgtaggatatgtatcagatccagatagcagattggattctttttttggaataaagaattcacagcgtgcattgaatggcacgcctggtccccagcttagattgcaattgtcgaatcggagggtgtggtgggtgccaatgctggtggtatcgtctgcaacgtcgatctgacgaatctcgcatgcagtgcacacttctaagccatatcaatcagcataatatcccgcgattgggtaaattgtcgagtaaaaagcgggcgaggtctatcaggttctcggtcaaggctgggctgattctttgttcaacagggagtcgtcacttgcctattacgtctggcacttatcgactaatttctggttttgttgattctcagctttccctgaacttctaattagtcacacctcatattagtccgttctcatattagtgattcggattcgcgagggacttctttgtttccatctgcaggcaaccgctcgcgtttcggataatcatgactatacgcgatctaataaatctcaagagagagccagggaaaaatcgtgctccctggctgttgaaggttcgttcctcaacgggttttattatcggtgcagtctggatgtccaccttcacggtatgtgagagtctggtcctctattcttctaagtccccaactgagactcaattgaaataaggaattcctcctgtatgccatggtaagcaagatcttacttatgatgtgagttgaacccagaaccaacgaacgacagatagtccccgtgatgccaacagcactcgtcacccgagccggagtcggattcgagcaccgtatgtctaacagcttccctggcaaactattgcatactaacctttgaccaggagaatactgggtcagcgtccttctcatgtgcgaagcaggcatgtctctattcatgtgtcccatattcggctacctggtcgaccgcgcacgcacacgtcgactacccttcatcagtgccctggtcatactaaccggctgtatgctgatcttacaactggcgcattccatcgctgcgtttgtcatagctcgtctactccagggcattgcaggtgctctagtagtggtagcggcattcgctctcatcggcgacgccgtgtcccaggagcatctcggtcagacaatagggtatcttggctccgcgattgcctcggggttcctactgggtccgttcctcggaggcgttgtgtacaattcgggtgggtacaacgccgtgttctggtttgcgtatcctattcttgcgcttgacatggttatgcggctggttttgatcgagaagaaggtggctgctcagtggactggagaatcaaacgggaacctggagtcggatctggagacggcgcagcgtattccctctgtcggttcgcgcgaaccacaggtcatccaaagaaggaaagggctcgttatcttccggatgctcagacagcgccgagtgttgatctcttcgtgggcgctcctcgcgcagggaatcttgctttctgcttttgatgcggtatgtactagactccaccttttcaacatgaatggttggctaatcacatccagactctctccatcttcgtcgaaacgacatttggctggaactccctcggcatgggactaatcttcctcccaatggccgtcccggccttcttcgagccgctgttcggcggcttcacggacaagttcggtgcccgctttgtagccttcggctgtttcgttcttctctcgcccaccctcatctgtctccggtttgtccaggcaaaatcgaatgaacaaatcgctctgctggtatccttgctcttccttgtcggggtcttcatccacgcctgtgcaccagctatgtacgttgagacgcagcgtgcactcacggcaatggaactcaagagcccaggcatactcggatccaagggtgccgtggcgcagggattcggattgcagagtatgtgccagtttgctggggtgttcttcggaccactttggggtgggtttgtcgagtatcgtttcggatggggggcgatgacgggcacattgggagttttcgtagcgctcactgcgcttccgatgctgtggttaggagaaaccgaggaggagagggctttaatgagctgaatgagggttacgcagttaggcagcacttttttcaaattattttttccaacgcaggtatcagttctgcctacatgtaagcaagtaggtcacttcggaactatacgttgcacctggattacctaggtatagtagcggctttacaaggtgcttatctttgatatatttgtatgcctagaatctctggaatcttttgtatttcatagcctattatagctgcaatatatgtctgggtttgtgtctctcgatctatcaaggtatcctttagaggccgagaagtgaggagttgcgcgaggtgcggcatttgattctatacaaattttatagactagacaccaggagaaaccagataatgtatttacacagtgttacctttatttagatccaggaacatatgataaattcaattcctctactccgtacagcagcaaaccgaagttcaaaaacggttagatccatataacaagccccaccacggtgttaagcttatcgcctggactatcccaatgcggcagctcagtcgttctcttccttttaacttgtttaggctcatcgtcgacattcctctcatctcctcatattgactccattgggatcttcccttcagcataaataacccccaattcgccccgaccattctccccatggcacttcttcactcgatccaacgactaagacaagcatctaccactgtcagtacatcagtctgtcgcattctgtaccacacacatgtgatctaacccatccagatctccttagctcgacctcacctaccggtcatataccaatacaaacccccattccaaccaacccacccaacagcaaccatgccgcccaccaacaaaatctggcacatccagcaccgcgccctctcactccaagcagacagagcaaagcaatacatccgcccagcagaaacaagcacccacctagcaaccctcctaagcttcccctcccgccgctcgaccctcccagagctacacgccaaaacaagcaacgagataatctccctcgcgaccacaatcgcagccttcgaacccgtgcacctctacgcccgatctgaagacatcccacaagcccaagccctcctcgacaaacaaccccagcaccggtccaacataatcctcatcgcagcgccaacaaaccactgctggatccgcgacacaggccccgtctacgtccacagcgccgacccagcagacaaaacccgctacgcaatcgacttccgcttctgcgaatggggccacaaaaccacagaatacatctacggcgccaacgcctcgcccgcagcagcagaggcgctcgaaacatccccgcaatacgccgagtggccggtaatggacgcgcaagccatgagcgagaacacggcgttcgcgggcgtcgtgctggatctcgagaatgcgggcgcggacacggtggcggatgttgtcgtgcgggtggagacggatatccggctcgagggcgggggtattgaggtcgacggcgaggggacgttcatggcgacggagagtagtattattggcgatgcgcgcaatcctggactcgggaaggcggagatcgaggcggagcttcgtcggttgctaggtgtcagtacgttcatttggttccccgggagggtggggctcgatgttacggatttgcatgttgatgctgaggcgaggtttgtgagacctggggttgtggttgtttgtcgtccgcatgagaaggcggagaaggtgcgttgggaggtctattcggagattcgggccgtcttggagagatctactgatgcgcgtggtcggcgctttgaggttcatgatgttgttgagccggatccgagcttcgttcaggggggtcttgctggggaggaggaggcgtcggcggcttcgtatgtgaacttttactttgttaatggtggactggttatcccggcgtttggggatcctgaggctgatgagaaggcctttgagttgatgaagagcctggttcccgggagggaggttcgtcaggttgaggtcaatgccttgcctaggactggaggtgtgctgcattgtgttacacagcaggtggtgtgagggcactagctagctgcctaggtaaatatacagaatctgatttttagaaacggtcaaggaagaatattcaaagatgtgatattgatagtgatgttgatattgaaaaaagaatgtttttgaccatagacttgctagtgtggaaaataaacagaacggaaaaagagaacggagagagagaagtcgaaacgagagactaaacaaaccccattcccacgcagatcataattcatgtagaatagtgtaagatgtatgtcttttttgggcttcttttgtaccagcaaaatggccagtaagaaaccaagatccccaactggaacctgatatcatcctccgatccagattccagacctagaccgatatcagagaacgcagggaagaaacgaagaaggaaaagaaagaggagaacaccgtcccaggacgcctgataatgccgcgccacgaagcaaagagaacgcggacgaaaagaggccaaaaaaaagaaagacgcatagaatccgtgatggagcagtgtcagatattcacatccgatcgagcatccgattgcagtcccaggatgatagccagtcaacccagaacagaccgaaaaccaaaccaaaaaccccataagaccctctcgggaccccgttccccccacatcacgttgatcttatatctcaaagactcaactgatcgatactccccacccgcccactcccgccaagccgccccccacccttcgtaaccatcccgagtcgatagaagcgctcttcgccagcgggcgtcctcccaccaatataccacttctccggaccgatggcatcgcggaacccgcccgagccactggaagaatcactcccgcggcgctggcggtctgctgagccacgattaatcgggatgggagtcgaggtggatgatggtggtgtggaggggagagatgattggtcgtggtgatagtggtgtgaaggggatggactcgggccttggacttggccggctggtgctgtagtcgaggcggatgaggatgtgtgggtgtggtggtgattatggtggttgtgagtgtgattatggtgggctgcggcagaagcagatgatggtgctgatgagccttgggctgagttggctgcttttgttgcgatggcgcgggcactctgggagatctgggcggaggaaagggttgaggttgtggcgccgacttgctgggcaggcttataggttgactgggcgcggaaggcagccaggaagttggcgaggaatggacggttgttggacatgattagacagggagaggattcacctgttgttgattttgattatggaatgtgaagatgtagaataggagaagtctgagagtgcccgatctcaagttcccgatcccacgggcgctccaatcacgggcggcggattatggttatgacgttacataggaagatcccggagacgttatatccatttctccgctactccgctacatcttgtatatacaacgtatcaattgaagtatagatttgaagtaccttgtgaacgtcttctccaaggtaccccggcttccccagatactggcacgtcaaatggatcataagtctatttctagctgcttttctagtaaatcctgagaataaaacaaacaccttaaatcacacctcaaggaattcccaaagcacacatatgtcctgccatgccgactttacatgagaaaagaggccatgcgatgcagaagaaaaaacgagaaaggaaaagataaaagcacatggcaaaaaatggactgcaagaatgaaagaaacatggcaattcgacaacaaccatcccataaaaaagagaatgtaagaaaaaaaagcttttctcctttctgatgtcgagcactcgcgcaaaagatgaacacatgcccatgtctatgttgtggacgccgaacaaaccaccataccatctgcccctcacatcgggggttcaagataaaagataaccagactcgcaaaccacttaagaatgcacacccacaccggatgggatcagaatagaaaagaaaagaagatagatcgacaaacgtggaacgggagacgctagatcacgaaacaccgcaagctgaaagccgcaagcgaacggatcaaaggactaccgtaaacagatttgttgaaacatcgtgaccagtggatttgcaccagcggagaagccagggacgaagccctagaaacaatagaagagagggtggagagcaatagtcctacccacggcgtgaagaagagaggaaccttttgtggtattttacttagtcaaaacgctttttcaatcttatgcctaggcatcatcttgctttccgaattcaccgtctattgtctcgcgggctgtacattacctgcatattttttgttagaaaccgatatcataatcaacggcataaaaaaaaaaaactaaccgtctccgctcagcgtagtcgaggcaaggtacagtccgttcataccgctctcaggaccggtcgaggcagggtagtacttgcggtcgtggtcgacgggagcgtggatcggctcctggcccgcggccatggagtggggaaaaccggggttaatgtaaccgtcggaggaaccgtgctgaaacatcgaattccagtcaacacccgggtgatgtgagtggggaccgggcatgaccggcttgtggtcatggtaaaccgggggctttacctgttcaaggggacgatcacccgtcagctgctggccatgagcatcgacaccaggctgcatgagatacgggttctgcttaggtccagccatccacgaggctctcgcgtgcgcctggccagcggagaacgcgtcgtcaccgggaccacggttcatgccgttgacagactgcatcgtgaaaccgagcggctgctgctccgcgtagctaggacgacctgtggccattccattgccattcacggccccatcgtattgcgtacccataacgccattggagtgggggacgggattactgacttcatcctggagcggcttagggggattggccgcggcagccgcagctgcttgctgctgagaccgcttcagatgggcctgcgggtgggacaagtgggtcgctccggtcgggttaccccgtcggatcgagcatttttggaagtgacgcttcaagatatcactgcgggagaaagtgtccttacataggacacacatgtaagggcgatcaccagtgtctatacaaatcagacagtcagcacatctcgtcctaagggaatttttctgttttttcttctttttttttttttcttcgctctaccgaaaacttacgtctcaacaaatggcgcttgaggtgcttagcgtggaggtaagtcttgttacagtgcggacaggggaatttgccatccgcgtcctttgcgggaatcgtcgtgctcttagctgtaccattgacaccgttcgaaaccggagtcgcgcggcccgggacactcggcaaaatgccacggcggccctgagagcccacgacctgcgtgcgtggcggttccttggcgtagggggagccgttcgcgccattcacatcaggagtcataccccaacccttgccgtcggagtaactaaaggcaccggacggaagaccattgaaatccgggcggcgatcgcgggggggtgccggagcaatcggctgagggtagctctgagcggaggatgcgggcggaaggacactcggaggtggggggtactgctgatgcgcctgtgtttgagggttaggaagattcaacagagacgatggcggaaggctaccgacagtcgtgtgcggcatcatcggggcctgggaagccccgtagacatcgtgagttgacggggggtaccgcgacaagtccggacggtacggctgccccatgtagtggtgaggcgcgggagactgagggtggtgcggctgcaatggaggcagagtatgcggctgcgaaaccggatactgcggctgcatcgagtattgtgggatatgcatgctcgagatgggagtcgaggacatgggcgtggagccgggaggcagactggtggatggaggacgggaagggtgagatctgggatccattgtggacagaggagggagatcgtgtagaaaagaaagaaaggatgttggttcacggtaactcaatcatcaaccctgcactctggatgattttttttttctttgaaggaaaggaagctccttgtttgaaaattttcctgcgaacaagaaagacagaggcaaacggtcacagggtctcacgggattcacgggattcagactgagttgactccacacgaagagagaaaggaaggaagagatgcttaattgaagaagattccccacggtcacccactaggaagaaaaaaataggatggtgatttatccgcacgttgtgacaaccaccgtcgatggttctgtatccaccgaagaagcgggcgtacaagtgggtctcttctctcgcagcaaaaacaactagtccgagatctgcttcgcgtcaaggtaatccttgagatcgaggaattgagccaatagaatggaagtatcttaaagaatggaatagaggaattgaagggttcgagaacagggaattgagtgattgaagatttgaggattgagaattgggaattgggaattgggggaaattggggaggaaaagagaaaatgggggataagtttcttggtaaagacgaaaaggaaaattctaaggaagaccggatcgaaaaaaaggaaaaaggaaaaaaaagaccgaaaagacgagaaaagacgaaaaaagacgatcgttcctcggggaggcaagaggcgacagacgaaaaagaaaatgcgaaaaaggaaatgacacgtaattaccgtatttttgcacttgccagttccaaatttacacggccgtcttccgaagtatggccgatagcggtagggacgtattaggattgttgggatagatagtttggatattgaatattctattattcggattggattgagaataacacgaatagcgaataaccagccgaatcactttacacatagacacatagacacgtacttcagcacatcgccatctctcactggatctgcccacgtccgggtacgatgacgcacgtaaggtatatcccatctaatcacccgtggacggatgataataagtcccgaaaccattgaactatatcatatgcaatccgatgattccagagatagtagatcgatatatcgtgaactttgtatgtatgttgtagaacaaaacacaaggttcactgcgatatgctacagcccaagtcgggatccctccgatcgcggcgattgccagactaccattgggcagaccgctaacactgccaactattaacacatagatatgccgttgtgtatgattatctgatgttggagtagatcttattatatttggagatggagccatctccccgaatgtggattgtggttgaccctggctcttctttgttttgggctccgcagtggctgacagccccgcaagtgacatctgatatgtattcaaccattactctgcggactacggagtactctatgtctatatatctttgagctactccgcagggaatataatgtaggtagatgaggtctcagactgtataattccacccttcactaatctcttcaaacacgttattcaggggagccagaggaagagctccaatgagctcgagctcgacctcgtcatacatcctctgttgtactggatttggctcctgcatgcagtctagatgtacatggccatggcacatctggcacatctccagaagaaggtgcatgcgttctcaggctcttcctggaagactggcgaccggggcttctgtaacggccatgcagtgttgccgtagagtacttaagtggatgcgctgtagccgctctttgcactgctttccgcacttagcttgggactcgaaaaacatgacgcgaattgcacttcgtatattgtacataaaagaaaacaagataaagctatcaatggcacaagtctaactgggagactattgctgcctagacaatatagagaaaaaagaggagtccgaagtagagtgtttttgctcagttcagccacacaggaatgctctagacgaatttggcattcagggggttccccttattggacgtggctacttccgtgggctgacataggtgggctgcggttcgcgtacttttgcaatgcagatttcttattctattattaagccgatatctcgaccgagtacggagtaacatgacctaaagtttcagatcctgcgcgccattcgagtcccgtgtgactaaaaacatacgttggtcgcattgagattggatatttcctcaacaataacaatataccttggatagactcaactatcaacatgcaaagaatctacatcgcactcctgactccttactccgtatatttgccggtgatctgtattccggacccaacatccctgcccctcctgctccaccccttcgcaagagcttctcccgcttcgattgtggacctggaaggcttcgaccagggttctgcagaaatattgaactgaccacctgatcttaactttgtgcaccctactttgggtgttcatggagagattatccttcactattttattatactgacatgtgcgaactcagattccgccgaggggcgagcgtgaattcaagctacgacgtaaaaggaagttcgcttgaccttccactacctcggtatgtgtgtacgtgtatatcagtccagtcaccgctagaatatcgtgtacatcctaacagcgtcaaccgaattagctgcatatcctgtctgttgtcctatgtctcctaatgctgcctaaaaggatttcgacaatcaaggaaaaagaattcgttcttggtggcttgaacgcggtgtattgaagtagtaggtggctgcctctactttttgcaaaatgcactcggcatcaatgccgggagttaacggactccactccaaagccccccgaaacggttctcaaagtacggtgaggcttttcccgagtctttacatatggaatcggatcaggggctgtcaattcatttgttactaatgttttcttagtctgttactgagaccagattgttgtgttaagactagtcggtaccaacaagccggagatcgtcgcttggtttttccatgaagagcttgaccgtatcctagtcgaataatatgtaccaaacccactaactgacatggggccgccaatagagctaaattcccggatgcttaaggtgctgctggcttcagtacggagtacggagtagcaaccgggatagaagagaatagcgcgcgcgagatgtagatcccgccccagtctccatcgctgccgaatagcatatcacgtgtgatatagggttgtgtatacaacagtggcattatttaaacaaagaatatagagcgataaaaaaagaaagggacaacacgtcaacgtgttctacacgctctatacaacgcacatccgatagcgctccccaacatcatccgatacacacaaaaagccagcgttgttctcggcatatgccggaaacaccgctgaagctaagtccggatcgccgagtttcaggaatccacgcagccaatcagggacgaccatccggtgcagcgggggagaggatcgtgccaccaccaacctcataggctgccgatgtctgtagtcgaaacccagatgggcatagcgtgttcttccacacaaggtcctcttggaggatctgacttgatattatttgggatttttgatcggttacttgcgggctatgcgatttggtttctcgttccgtctacagagaatcgaaggtttgatgttgactttgaaattgactttgagaactgatatcaagtatagtggctaccgtcccattctccctttctccatctttctccattttcccatgtgttctgtggatcggaatccattcgggtacaacatgggggttatggggtggctcacggtgatcaggaacgaattcgctatactaacatagtacctctgtattcttccatgttccatataagtaattgccttgacctggccttggaatcaacgtgtaccagtgaaaacctcccctggccgcgtcataggtttcggatagaatttgatatgaggcgcatatgtgattcgcctcctattaatatctgatactcgtctcgctaccatattctgtggccgaatacagtacaagtagggcaagtatattgtgagccttggaatcctcgatccacaaaccgtggtcgggccgaaccatctgtttgcagtgtaacagggattattgcttgaacaacccatttttattagaatgcataaatccaagcgtctaaaaagcagcctatcggaccgacgcattggatgagaaccccaataataatacacagtcaaaaaaaaaaaaaggaagtaagaatacctaagaaaaaccaaaatctcagttcacaatggaaaaaaggcaaaatggtcccgatttggaaatcgtaacgtacaatacggcggtagactcggctcacccccgacgaccccaaaacagccacttccacgattgccacctctctgacgaccttcttttttattttatttcttcttttccctcggccacggttcagaccgctagatctgtcaaagaaccaaaaagagcaactccagacggtccacccaaatccaggaaccgccaaaaaacccatgggatccaaatcctccaacccgacggttcaaaggttctgggattcgtcataacgtacgccgtacgccgatcccggttcctggggggccttcctttttactctcagcccctgacagtgacgatcgggactgcgtgcaatcagcccggacgggagcgggcttgggtggacaagaggggcctgtactccgtacaagggtcaccccaacacgttttcttcttatgtattcttactttccgcattcttgtcccggttcttgtggttggaggcgctttgagtttttcgttttttctttccttctgtcgattccaaggtttttgacttttgagcaaattatgtactcgtgactatgtattcgttctagattagaaaatatgacaaggaaactgcgcttactattggacgctatatgtctttgactcttatggccgacacgggagtatacaagtgggaccccctattgttatagtaggctcctcgtgttaggggggtgtgggctgtgccccccccttcatctggagtcagattaagcatatctttgttccaacccttttttttgtttttctccgtggcatccatgttcagtgtccaccaccgccggtggggtctcaggggtgggtggtggagcttacaggattctccccggggatcccagcgcagggcacgttgtacaaggtacttggccgtgggggaaggtggttgctgggtttcccgtactttcgggattgggttaggtttcaaatatataacctcgtgtccgggcttgctctgggggtctatgcattgattggcttggtcggtgctttctcatagggcaagtggtgtagattatcccgtcatagagaggtactgtgtacaaagtgtattcgagagatcagcaatttgcatggttattctgcagcgtatattttctgcatgcttggccttgaatacgaaggactattatctatggtgggatatgacgtgctataggcctggactaaccctaatgcagctgtatcgttatatcatgagtgccgttattctgcaacccctcggttaaatcgtatacatagacgatataaaatctgcagtcgctctcatccccagaatgtcatatggatgtcatatagtcaaccttatccagacatttggaactggtggagcagtgagtttgctccatttgctccgtcacatagtctaactcacgccaggaggggcactggggctccatatcattctgtcggatcgatccatatttatggagccagatctatgttattgtttctgacatgcaggtggcgaatgcagacattcttgacggtggattcatctagggccatcactactgtttacagatagaagtctctgcacgaagacggagatattttccccttccgtacattgggtcgagagttctgctctttggttggtggtagtagtaccgtctgctcgtactagaagattgaacatatcaaacaagacgcaccgaaaaatactttggaaatgtaatgacgtgccccacgaggctataatattaagttatgtaccaacatatatcaaatcttatctcaaactaatacattgactgctccacaaaccggagatctagataggtttatctgcatcatccgtcttggaaaatgcagctgcctcagtctctcgagactcaggctcaatgccctcgctaacgtacggctcctgctgaatcgcatggatagcatgctcgacattgactacaggacccgtgaaccagcgatgggcatcaacaaaccaccaaatcgtaaccgccagcatcggcgcaccccaaacaagacaagtccagttcatcatatcaggcgtcaggtctttgccagtaacactaggcaaacacaagatcgggaccatcaaaagcacaaacaaaacaccaacgccaccgatatacgggccaaagggacccagatgccaggggccccgacggaaccgattaccgacaaagaacacgcgaatcgtgatgggaatggcgaaagcaaagaactgcgcaatagcaccaatggagaacaaagccccaatcgccacgtctccagccagaataagaagacacatcaagatgccgaggacggcattcagcacgaccgcattgaccggcgtctgcgtaaccggatgcacctgcttccagtaattcgagaacgggaagcagtcgtcacgggcataggcatacgtaacccgcgacgcggcaaccatacacccctggcccatggagaacccacagataatcgtcaaggccaggatagccatcgccgtcttctgcggcatgacctgcagcagatacgacgcccagggctgtcccaggtcggaatccataacggcctcgatgtccagcaccgtgtatgcaaccaccagctgtaggaaccagcccatcagcccgcccacgccggaggtgagcacgatcgcgcgcggcgaggcgatgttcgcgttcgagcactcctcgctcaggtggaatggcgagtcgtagcccgacatcgtccagatcacgccgacaaaggtcatgaggacggcgactccgtctgggaagtcggttaggttggttatgtcgccccagacttgtttggagggtgtgaatttcgggctgttttttgtgccggcggggatcatgatgatgactgcgaccagggcgatgaaattgaatgtcgagccccatgagttgaactgcgctacgtgcttcgtggacatgctgctgatgccggcgtgcaggatcattatgagggtcgtcagcaggaagttgtgccaatttgtcggggtgtattctgggttgttgatcgaagctgctgcgaggatcattgcgctcagcgagtagttgaccgatggcgctgcggtgatctgtccgatccagttggaccagccggtgatccaggcggcgaagggtccgtagcccggaggtgcgaggactgctgcggcgtagtatagtccgccgctgtatagacgttagccttctgaaccctaactttccttggatgtgatatcgagcagtgtatcatacctagtcggcattgccgaacatagctctgccatcgacattgctatgcactggataaatatcatcgcaatgatccaaccccagaccatacccgctgttccggcatatcccattcctttaatccagtgtcagctataccttgaacccaatcttcaaagcgcagatctgtgagtactcaccataccacagggtactcgcaaatgacggtagcaaccccagaacagcaaagctgacgcagaaagtcgtccatagcgagaactcgcgcttgaactcttgcttgtaaccaagcgccatgatcaccctctcatcggcatccatctcatgatccgtgtatggcacatcgccatccgggagaatggaagtgacttgatctttgttgacctcatgatgtcctttggatatgtccgacgaggcagtggccgttttggtctccatgtttgcgcccatgaccaatataaataggtatggcgctcttaatgtgtgcgatatatatatcaacgaaataaaatgacaaccatacaggggggaaacaggaatgtcttcactttaaaccacagccgagggaagtcggagcataataaaatagcacagactaatggtttttgagcaagtcgacaggggtcagccatgttatctatagcacggagcattttgcgtttcgccccgcatcaagacatgggaagcagctctctacgcaatagtacaccttacaacgaggtgagataagagtcaatgacatatggattgatgtggataaattaaaaaagatagaatgaactgcacaataaagaggtattttattcgaacacgcgatggcctcactgtgcaggcttgtgatttgtagggacgggagataccaccgctgattcgaggcacagggctttgacgatcggtgctacgagcttggtagagagaagtctagtcccagcaaggaagttccaggcgttatacttcacgggacttctgccgtgagacagcgttagcgcatcagatctgcttatcaacctaatgacagagataagggcttgactcgccaggcgtccacgggtgtcggctgtgctgattggggatctgttcggcgttctgaaacctccaggactgccattataatttgaggcttgttatctaaggttggacttaccttgttggggaaaaagggctatgcattgaatgccggagaacccttgtttgtggtatgtatatgtcatgaatacatgcatatctacctagtcccaacgacagcgctatctatagtaagctcggaaactattccatggaacattcggatgtccgacgtatatactccgtgagagtccgtgttcccgagagctctaggtttttcagccctatgaaggtgaccatatttactttgaaacaacggtttctatgtggtattaaaaacaaaatactttcatcgctattctacacagtacagccccggcctgtccctcaaaagctctgattcatatctatcgaaggagagacaggtatataccctcgcgaatgattcagaaggcctaagaaagtcagcatcatatccaaccctccaaatcaaccgtaattgactcacattgtcctcaggggcgatggtgcggtcgtagtagttatcgaggaaaggaagcttgcggagaatgtcgttgcgcacacggggaacctcgccgaagatgaagagggcaccggaaccaagggcgacaccgaagccagcagcgacagtaccactgttgagaacgttattagcccctgtatcctatccaaactggatagtcgaatgcgggatgtactcactactggacggctgtgccaagggtcatacccgcgacggtgcgggggatgtagtacctgcagattagtgaggcgttagcttggtgttctgcttgcttgattgatcggtcttcttcgatatccagctcttttgtcaaagcccatggtctgctccccacggatgccggacatccgtcaagctccgctgcaagaggagaaagacgggaatccaatcaacgagaaaagctgtgttggcaagtacaaggccatattttatttgctccatccaacgtgctgattgccgaccaacgtgtactgtccggggttcgaataagaagggtatgggggagtctcacttgggcgcataggcggaggcctgggcggagacctgggcggcggcgcgacgagcagtaggggcgaactagaggatatatgttagcaattgacgtgacattttctatctcgttttatcccgcggctcggaagccggttgtgatactcatggccttgtcctttagccggagcgcgaccaagtaggcaaggaaccccggaatagaatacggggatttctcatccatcgggtatgaaagcacttaccattttagaatacaccggagtgatttggtgggacaattgctaggagacaagagctggcacttggtggtcgacgaaaaccgggagtgcccgagtttacacgtgactccaaagccagtggccaatcagaggaggcgtaattgttttcgctcaagtatgaggccgagtcaatggattagttttattaaggagagtccaaattttagtcttacatcctgttttttatgctcaggatggaaaatatactaccacaccagatatagatggcaaaagaagtggcacctgacgtaaaaagaacaaattgtagatattaatgcgttaattgacttagcactaggaagccttgcggctcccaagaagctaatacgcctaggccccaaaaattcgcgtgatagctgaaataaatggaataaaaagatatgtgcttcaaaaccccttgatctgacatgcaagggattcaactaagacaggattgatcgaacaggcgcacgaaaggaaagcagcaatcaaatacagtggaaacaaaagattataagaaccacgtagccaaacaccctaactgtacatttgtctcattagtcgactttgtcggtcgagcctccattcaggaacccctctttgccatccaggtggaagaagccaccgttgttggtggcggtgttgccaataataccgccgcgagcagcactacgtctcagacgtccacgtccgaatatggtagccacagcaaccacggcacccaagatgatgaagaagaggatgggatgactgccgaggagggatcgagcaaagaaaaagatactctcaaaagtgccgatggtagatttgggtgacaacttcgaaggggaagcgatgacgagaggaatagtctcgagaatagaggtccgtgaggccataataggagctccacttgaagcagtatcccagtagcggcggttctataggaagtcaggtatagtgcttaaacaaatctcacgagggaagacttacatcttgatcattgataataacgcggtcactggtttccacatcgataccgtaggttgtgcgcaaccagcgttcccaaaagtcgccgtcgacccaagcaaatgcgacttgcttcttatcgtcctcgcggatcgtaatacgcatgtttttcgcagcccgtagtgcacgctgatcattgcggtcgtcggcttcttcgatgcgcagttgcttggaatcacgaagttcagcccgctcaaggcggaagagttgaacctgcttgtccatccattcaagagcggcttccttcagttcgcgcttggattgcttaaagtcatcgcttcggcggcggctgaggagtccgagaaccacgaactttccgtccatgatttcttgggcgttggatgcggtgagctcaggtacgatgggcagccacacagtctgcatccacgacaagatttgacggaaatctctcatgtccttaggagcaagggcattatagtagttgggacgtccgtcacggacgactagaagacgaggccaggtagagatcttgaaccgctcggaaagaggagcactgtcagacttgacaatgcgagcgtgtcccacaagactaagggtgaggcggttcatggcctcgaaatcttcagatgtggtcgcgtggtcgtagagatacaggaacagaacctcttcggtttcttccaacttcttaaaagtagtcgaatcaacatcctgaatgctcgagcccacaccgacggctttgttggtgtatgcgatcagatcacccaagccacgaagaccggtatattcaactctctcgccgccacggaagaagtagatcgtcgggtaggcattcacgcgagcatcttcgcacagtcgcttctcaagatcgcagttcacttcgccaacattgagagtatccttcatctccttggccatcgagttccagttcggggccagagcttggcaatgatggcaccaaggaacgtaaaacttgatgatccatggatcgtgggtagtcgtaacaagactttggaaactctccgcagtgagtgggatagaaacgccctgggggttagcaggccgtccttggagcttggccttgacagactcagcgctaacgccttccaattccgcggtctcgatgctctgcttctcgacagctgttttagcgccaggctttaccactgcaggtttagcggtcatttccatgctctcagcgccggcctttgggatttggatgccttgcgaaggtcgggtcccaggcttgattgtctcgagtttggcttcaatcatagcggcaatatctgacatcgtcttggcacgcgcggggggttcgttctgaacgcccatatcatagaacgcccacgcggggtaaaattcgacgttcagcttcttgcagaaatcgccgaaggcctggcagtttatggacccgaaatggagattatagtagccagtgaatgagtccagagacgcgagctcatcgggtttcaatccggagaggaataaaggatttgatgtctatcactaatcagatccaaggctcaaatgttgaaataaggggatagattctcacgtagtagtactcatacagggtctggtacaatggggcggcgatccggcaatgcgggcaagagggggaataatgtttgatcatcctagaatagttagagccttgagcggtttattgattgctgcagaagggattctcaccagtaaccatctttggtcacttcctcgaaattctccggggtcagctcggtcaacgggggcacttcaataccattgaatattgtgggtttgtcggtatccactccacgagacgcccttttgacaagtgtatttccagattgttggtcggaagcatctgaaggcgtacccaaagcaggcgctaccaacagtgagaggagggaccaccccagccaagacggtttcattttggtaaaagaaaaaggcgaataacttggatagcagtttaaaggagagtataagtagtttcaagatgtcaaagctgagcaaaacgaaggactctggtcgaagtagggaggataatcgcgaaatgttacaggtggcacattggacgggggcgaagactggcgactcgggtgggcactggtcacgtcgcagaaagaagcagcacttagcgactatagcgcccgtagctgagagcaaaatagaactgcacacagtccaaacaaagaaccagatgtgaggctttgatggtattcggcaaaggtaagttgttgcgtttccccctgccgtttcactatggaacataaagttaatccgctccgggccgacttcaccacttcatctccctggaacagagcgacttcaatatcaccaaatccattcacaatgcgctccacactccggctactggccaatgtcaagccccggtatttggagccttttgctcctaccggattgacgggccttttcacccaccccagccctcgccctactttaatctacctttactcgactactctgcagaagttgcaggcgttccccgaatcctccgcctaccgccaatccgttgaggctttgacccgacaccgcctccaagtcattgagtcgcaaaagcccgccggattcgatgcatggttggagcgtgtgcggaaaaccgtggcagccgaacctgagcggtttgctaaggtccagcactccgacggcacctacacccatgccgctgcccaacagaaggatggatccgacaatgctcgcggtgaagaatgggatggcgaagccctctcagctacaaccgagggtcccgcccgtaccccgcaacaagaaggagaatggcttgaaatcatgaatgaggctagcgagaccaccgacaaggccgatcatgacttccaccacgaacatatcaaatgggagagcgagcctgcgcttgatgtcgaccagtatgtgtacctagctttccgaattgacctcgaacaatcgcgaatctaacgctaatctattgcgcaggatctctcacatcgaacagcagatcggcgccggccttattgaggagatcatccaggtcgcagagacagagctcaagcttgtggatcagttggccgaggccaaggtgtaagtggaaatttgaagattgtggtttagacttcttgctgacacttttacaggtgggaggaacttgaggaaaagccccaacccggccagtggtcctacttcgagcgtggtcactaaacagcaaatctggaatggctatgaattttaatctctgtaactactactagaggtctctttgtttgaatacatgttttgagagttcaaacatttgaaattttagagtgagtcgtagagctaccaagctatgattcgcatattcgacgaatgaaggtataccagcaatttctatcggacatgttgatctaattgagacatgtctatagcctagtatataggcaattggtctttcagtttcaattttatacatctgggtgatgattatgtacagcgaagtatatcgaaagtatttgagctattgctattttgtccagatccatacttggaatataagcttacatttcaccaatctcacatagcaatccgtatagctttcttcaatgcaaatgaatttgtaggacatttgtatagcggatagaccgactagaaggcggtgagccaaggcgggaatcccttgtggacacatacattgctgtccctgaatgaagcgcactccctcaagctctccttcatctcaatcctttcttaattcctccaattaataacttgccccgaggatcgctcctccctatcattgggctgtttgagcggctcgcgaaatctcctatcgctgtcacaggcccaacaccgcatcacacaaacactcgtctcatcccccacacaacatgcggctcgacatcaaggtacgcacgataaaacgtttcatatagttgcaaatctgctcttagcacatacagtgatatgatttcgcaggtgaacgtccacaattggagggattgctgacgataaatgttacagaggcagctgtttgcccgctccgagcgggtaaaggggattgatttccaccctacagagccgtgggtaagctttttcaattcactcagtagcttcgctcaaactaatttgattcttagatcttgacgaccttgtatagtggtatgttgagggaggggcagtatgcgagacgtacaatgcgctaattactttcctgtataggccatgtctacatctggtcttatgaatcgcaggtaaggcctgacacagatttacactccctatactctcgtctaacatgtctaccctgtagtctatcatcaaaaccttcgaactcaccgatgtccccgtccgtgccggtcgatttattgcgcggaagaactggattgtctgcggttcagatgacttccagctccgggtctacaactacaacacatccgaaaaaatcacctcctttgaagcacacccggattatatccgttctattgccgttcatcctacccagccgtttgtgctcacagcctccgatgacatgacaattaagctttgggactgggagaagggttggaaatgcgtgcaagtgttcgagggccacagccactatgttatgggcatggcaatcaacccaaaggataccaacactttcgcctccgcatgtttggaccggaccgtgaagatctggaacctcggctctccccatgccaacttcacactcgaggctcacgagacaaaaggtgtgaaccatgtcgactactatccacaggctgataagccatacctcctcaccacctccgacgacaagaccgttaagatttgggactacaccacgaaggcactcattgcaaccctcgaaggccacacaagcaatgtctcgtttgcttgctatcaccccgaactccctgtgataatctcaggttccgaagatggaaccattaagatttggcatgcaaatacctaccgactggagcagtcattaagctatggcctagaacgagcatggtgtgtttcctaccagcggggtagacagggaattgcgatgggtttcgacgatggtgctgtcgtggtgaagatgggtcgggaagagcccgccgtctcaatggatgggtccggtaagcttatctgggcaagacacagtgaggtcgtgtcgtcagtgatcaagggtggcgatgctagtgtcaaagacggcgaacccctttctctaccaacaaaggatttgggacagtgcgaggtgtacccgcaaaccctgtcgcactctcccaacggacgttttgtttctgtctgtggtgatggagaatacatcatctacaccgcattggcatggagaaacaaggcctttgggcaagctctcgattttgcctggggtgcgaaagacaacagtaacgattacgctatccgcgagtcatcgacaagtgtgaagattttcaagaacttcaaggagcagagcgccggccttgatgttgggttccaagccgagggcctctctgatggtgtccttctgggtgtgaagggtcagggtggcattggcttctttgactgggagactggcagcctggttcggcgaattgaagctgacccaaaatccgtaagtttgctctaccttgatatttggaaattatgctaatggacacgtacaggtctactggtccgaatctggtgaattggttaccctcgcctgtgaagatgatttctacgttctccgctattctcgcgaggattatatcaacggtctgaacgccggtgaagccgacgaggatggagttgaggcggctgttgagttggttgctacaattaacgagaccgtccgaactggacagtgggttggagattgcttcatctacaccaactccacgaaccgcctgaactaccttgtcggtgaccagacctacacaatctctcacttcgaccaaccgatgtatattcttggctacctgcccagggatggccgtatttaccttgccgacaaggacgtcaacgccgtctcctttagcctttcgctcagtatgcttgaatatcaaacagtggtgctacgcggtgatatggaaatggcatctgagctcctcaaggatgtgccccaagaccagatgaacaaggtcgcccgcttccttgaaggccaaggatataaggaaatggccctggaagtcgctacggaccccgagcaccgcttcgagctcgcccttgcgttgaacgatcttgaaaccgcactcacgattgcccgcgaggccaatgttgagcacaagtggaagattgtcggtgatgctgccctggccggctggaatcttgctcttgcccaagaatgcttcaccaatgccaaggatgtcggttctttgctgctgttgcacaccgctagcaacaaccgcgaaggactcaaggccctggccgctcaggcctcggagtcaggcctccacaatgtcgccttctctactttgtggtctctgggcgatattgatggctgcatcgctctcctcatccaaaccaaccgcatcgctgaggcagtccttctcgcccagacctacaagccttcaagcgcccctaaactcgttgtccaatggaaggagtccctagagaaatctggcaagacaaaggttgcccgccttatcggtgtcccgcccggtgcccccgatgtcgcctctaccgatgacgatctcttccctgagtgggatgagtacattcgcctagagaaagagggtaatgtccccgagcccccttcctcagagtccttgattgatatcaacggcgatgaagaagaagaagaggcagaagcagagcccgtgagtgcgaccaatggtgcactcgaagcggatgaggaggtagagaaagccgacaaggctgcagtagatgaggccgatgctgccgaagccgagtgaacgaacaaaaagcaccgggttctgtttggtgacttttcaggagagttaggttgatcgtttgttttctggctgaccagtcagttcattcttgattgcgagcggcgtcttaacgtgtgtccgactttttttactctctcttatttgtaattgcgctgtcatgagtctctggagcaaattacatgcctagatacaagcaacatgtttccctttatttctagtcatttcttggttgttttattagatcattgtacatgtactaggtactaaaccggattctccttggtgcttgggcttgtatgagctcatactctgtgaacgttactgaaggcttctagtgtctagtagtaaaaaagacatgcctgaatgggccactgtctacctgctgccctgcggtgcagttgctgtattctggtcataaaatagaatacaccacgcacttcgcaactgaaaccgcccagggacgtgatccatcctactcggagactaaatatgatgcagaactgtttgggcattgtccatttgagagttttatcgagaatacaggacaagggtgcagacgatgaccgcttgagaaaagcaacgaaaccaagggtaagaaaggaacctgcctagagagaatgaacacttgagatggaagggagatgaccgaacaagacaggaaaatcaaatcaaagcgctcaacggccatatgaaacgacaagaaacaatgtcgtctcgaagatcaggagcgcctccgatatcaagatgccacagactccgttgtgatggaaaaaagaacaatatgatggacagagcgaaaaaagggaaaaagaaaagatcaagattggtcgatatgttaatgaaagacatatgcgcagttagaaaaggaaatggtctctatgaacctcttgtctctttctcgcagcaggaattctcgatctaatttgacgcggcgagaatctctactccgcaatgctaccgaaggacgggtctttaacactgccgcctgcatcgccgaggccagccacgggtcggttgtatgaccatccggcaaactgttgctgcatggtttgcgacaggacggggccatcgacatatgagtcctggggcgcctccctggtgaattcaacatcaaagttctcagtatcacgggcatccacctgcattaagttagccacatgttggtccattgcatgatcaggagtgaagaatacataccacgtttggtcggaagctgggttcatacttcctctgcagaagcttacgccagtcgatgttggcaaagaagtggtgagacttgatctccgcagcaccgttggcacccagtcggcgcacagggtcacggtccaacagtcgactgagaagatcccgcgcagcaggcgggacgatgtcgctgctggggaaggtcaaaggctcttgcaagatcttacgatacatttcgttggtgttttcatcatagaatggaggcaggcctgtcaacatctcgtagagcaaaacaccgagagtccaccaatccacagtcttggtgtagccgttgccaaggagaagttctggagccagatattcaggggttccacagaacgctaagtttggttagatatgtagggcgtatcatgagtggtgagatcttactattggttcggtcttcatctttcatgtctagcttgcagagaccgaaatcgcaaagagcgatatgcccggtgtaatcgagaagaatgttctcaggcttgagatctcggtagatgactttgaagccgtggagacactcgagagcgcacagcaactctgcggtgtagaaacgggctcggttgatatcaaatcgttgctccctttgcaaatggtggaacaactctccgccgttcacaaatgctaacacgaagtacagcttctcaggcgactggaatgaaaacttcagcggaacaataaacgggttgttaatttgtgcaagaaccgatcgctcggcgagtgtgtgtgtgacttccgatcgcgagataatgtgagccttgcgaattgtcttgagggcgtagatccgaccagtatccttcttcctgttaatccccgactgttagaagtttggacccatataagtagatatcgagtcaacctacatgacctgcatgacctttccgaaactacccttgcccacaaccttgagcaaatcaaagtcttctaatttaagactccgctgcttgttctccacaaaggaaataccaatcttgatcgagccaacgccaaattggagatccagccactcagtaccttgatgaccctgttgacgcccttgctcatcatgagctgcggcggccttctggttatccttcttgctgagcttcggatcctccacatatggctggctctcttcaaagcgagggttgaccttgcatgcgcccaagaagatatcctcactccgtccggcaccaggccgggcagcagggttgcgcagatacagctgtacattcaactcggtcttccgggacacatcgaacttgaaggctgtattatcaccagcccacaatgggctctctggagttcccgaaacggcatccacaaagacctgattcttctcgaaatcaaggagggcatacggaaggtatttggtggaatagcgaccgtggatagtgggggcggcattgattcccccacttgtggactggggtcggccagatggcacaaaggaacccgcttggttctgagatgaatgtgacgaagaagaggtacttgggcgcagagaagaggacgcgtaagagttattttggaaatgcgagttgaagatctgttggaagtgaggtgacaacgaaaaattgcgcccttcgtggagagtgacgataaggattcctgggttcacaggggccacaggaggagatacaagagactcggaagccgctatcagaacgatggactgattagttactgggggggaattctagtaataagaacaacataccgatcccgttcgttgatggggtggcggagggcgggttagaggcgacaggtgtcagagcctcatcaccatttgagtcacccttgatcgtcgaagtagacgacgaccggccaaatgatgaggtcaagggcgccagatgcgtctccttcaactcttcagacgagttggatcattagcgactgcctctggtccactgcagtgcagagaggggtattgaggggggagagagggagaccaactgccagtaaacatacttttagtgagcttccaggacatagtggcggttgttgtaaacagatcgaaaagaagagatcaaagtccaaggtaccgcaatgcgtgtgcagggtgctaagaatcacacccaataatcaacacgcaaatgccccccaaaataaacctggagagccacacaaggacacagatgataccacgcaaaaggaaaggagtcaagacagagacaaccaccactatagcttttgaaatccgaatggaagcacgactaaggataagaagaagtcggggagatcgaagatcgaatgagaataagagaggggaagtcccccctgtaattataatacgaagtatactatagattacctaatattacctctttgattggttgagctggtcacacactggtcactccaaggtacagtaattaatcagcctcagccactgctccgccacaagggttaacgacgcatcaccttccacgacttgaacaatcaaggcagttgactccacagaacgaggaagtttgagatccagcttggatttgtattggtatcattttgcctactctcccaagttccggaatattccccgctccgaagtgcggagacaccttccccggaatatctaacctcaactttcacctgcaactccagtactctcagactcctgactctgtttctctcgataccgcaccggacaaatcctaggatgaaagggatggaaagataatgggtgtgatacgcaagaagaccgcctcgcgcggcaccgaggccggcaccaagttccactgcgatgtgtgctccattgatgttacgtcaacagtaagtcttcatgtctgtcatggccatttaaaggtctgttgttttgttcagagactaatgcgattccatcgcataggttcgcatctcgtgctcgcatcccgcctgccccgaatatgacctctgtgttccctgtttctcagccggaaagaattccaagaaccatgaccccgccacacatccattccaagtgatcgaacagaactcagtccccatattccaggcagattggggtgccgacgaagaactgttattgctggaaggcgccgaaatctatgggctgggttcctgggcagacatcgcagaccacattggcggctaccggagcaaggatgaagtgcgagaccactactacaatacatatgtgaagagcgtcaactttccgctcgcagcccgtgccgatccagacgatagggccttgcaggattcgatctccaaagaggattttcaaacacgcaagaagcgtcgcatcgaagagcgcaaagatgcagccaagacagcacctccaaccacaccaaagcagaagccgactgccagtgtaccggcgtgtcacgaagtgcagggctacatgccgggacgattggagttcgagaccgagttcttgaacgatgccgaagaagcggtgcagcacatgacttttgagcctggggctggattcaatgaaaatggcgagccagacgcagagaccgagctcaagatgaccgtggttgacatctacaactcccgcctgacagcgcgaacagagcgcaagaaaatcctcttcgagcacaacctcctcgactaccgaaagaacaccgccttagataagaaacggtccaaggaagagcgagatttgttgaacaaagcaaagccactagcacggatgatgaactgcaaggactttgaagacgtcaacaagggcttagagtacgagcacaacctccgcctagccatctcccagcttcaagaatggcgccagatgggcatcggtgacctaaaggcaggcgagaagtacgagcaggataagcaacagcgcgttcaacgactgcttcctcaaggatcatttgaccgttttgccagcacccgccctaagcagtcacagctgacagagacacccgcggcagcgattcagcttacaacacctgaactgcctctgcgactgcaaaaagcggccaatccacacgcaccagcggactccaccgaagaaacactgaacgatttcgatcgcgccttcgctgtcgatggggatgcgcctcccccgcagccggcaaagacgaaatatgtggtgcctccattaagcgggatgccgtcgtggaagctggacaatgagactgctgccgatctgcatctcctgaccaaggaagaggcagaagtatgcaatgttctacgcctgatgcctaagccatatctggtcatcaaggagacactgttgaaggaagcaatgaagcagggcggcaacctgaagaagaaagatgcacggatgatttgcaaggtatgtttctcactcgactcttgcatgcggactcttactgattctgttagattgagggcaccaaaactagccgcatttatgatttcatggtacacagtggttggatcaacaaggcgtaggtgcgccagatccatcatacgctgtaattgcttctgagcttattgatatccaaatctatttgtgatttcgttcgggggcgtttttttttcggcgttcataaggaacttgggaggtgggcggatgtattgatctcatacggcacaggcaggttgatttatcacctgcaattcgtacaattgtacaatgcatagtaacatacagctatcgtctagtgtaaagcaacaaggccatagaacacttctaaagccatccttgatagagacgtagtaaactatcccccacactcctcggtcctcggttctccgcatctgcaaactacccccaacttctgtcgatcacctctagtttcctatatcatttccttaattaactcttctttctcccctctcctcaataaaaaatcaatctctcctagaaataccaagaaatcaaaatgccatccttcacaatccagcccccgaccccagcccacgcaaccctcacctacccagcaccccacatcctcctggttacgctaaaccgaccccgcgatctgaactgcataaacgcgcaaggccacgcagacctccacgccgtctgggaatggctcgacgaagagccgagcatgcgcgtgggcatcttaacgggaaaaggacgagcgttttgcgccggcgctgatctaaaaggtgagcgcagccatgtctacatacatacaacagcaaatatcacaacaaccgcaatctcacaatcccctaatgccctaatcccctctccaatcccttctaacaaaccgctaactcaatccagaatggaacaaccgcacctcatcagcagcaacaacctcaagttccacaacgccaatgccaaacagcgggttcggcggactagcacgacgcaagggcaagaagcccgtgatctgcgccgtgaacggactctgtctcggcggcggcacggagatgatcatcaacagcgatatcgtggttgcgtcatcgcgggcggtatttgcgttgccggaggtgaagcgtggggttgttgcgcttgctggggcgttgccgcgacttgtgcggacggtgggcaagcagcgggctatggagatggttcttacggggcggacggttggggctgtggaggctgagaggtggggacttgttaattctgttattgggattggtgagggggatggggacgaggagattggtcgggctgttttggggaaggctttgggggttgctggggagattgcggggaatagtcctgattcggtgcttgttagtcgtgagggagttaagttggggtgggagggtattggggcggatgaggctacagcgatgttgaatgatacttgggttaagaggttatatgagggggagaatatcaaggaggggcttagggcttttgtggagaagagaaagcccgtctgggtggatagtaagttgtgagattacttttttaagagaaggatggcaaaggatattgattttccattcgctattcatagttcagttcagtcagttcagtcagttcgtaaagtcatataaaacactgatcccattactcccgcgccgtatacctggtattcgcgatattccatgcaagttgaatttcagtcaaagcgaaatcaaatgcgcggttgccctgcctctcttctgaaatagtgatgttaggatgttgtgagaaggcgcaagaaagaggtgcctactttgcgtcggattgtacgcggtccacgaccttgaccacgtgggggaagagagggtggtctcgttccaagccggtcaattgggcagcagcgtcggcaggcgagttctccttgaggaccttggccaattccacactctcctcgtcaccttccacattctggaaccgcatagccatctcaagagagcccatcagtgcgtcaaactttccgccacgctcagccagctgagcagccgggccgatgaaacgctccttgcgggacagtttgcgcattggggcacggcccactcgctcgaccgtgtcctcaaggtagtggttggaaattcgggtgatgatggtctcgacgtactcctgctgctcggcggcgctgatctcatgtttgtcgatgatgagggaggcagtctcttgaagcacgttacggacaatgccgcggatgcgagggtccttgagggcttcggcaatggtcttcttgccggcattgtagccatagtaggccgcagtggcgtggccggtgttgacggtgaacaacttgcgctcaatgtagggctccaggtgaccgacccagtgaatagccgggatgtctgggtgaccaaactcgccgaaaggagtggactccacggcccattcatagaacttctcgatgcgtacattgagaccgctgtgggcgggctggccaggtacaatacggtcaatggccgagttagcaaaccgggctcggtctggcatagagccaacacggtctcgggcggtgttgtctttgatgaactggtgtagagtgtcagtggcaccgatagcgttctcacaggcaatgacggccaacggtgtggtggcggtgcgggcgtcgatacccttggcaatgacgggagcgataaacttgaggatgttcggacccacggcacaggttacaacactggcggttgagatctccttgatgacatcgctctcatgggtcttggagttgattgcacggtagttggtgatggtcttggtagactcgccctcatcactgacctcagtgacctcgtaggacttggtgttttgtagagcagtgatgatgccgtccatgacatcgacgaagacgacctcaaagccagccgtgtggaggaactcggccacgaagccacggccgatgttaccaccaccgaagtgaacagccttcttctccatgtttaagttgaagagatgtgggagtataagtgggaattgaattggaagtagaagtagaggctatagtagagtagagtagagagagaagtagaagtgggaggagaagtagagtagagtggttaagactaaagaggaagtcgtgtaagttgcagtttctccaggggaaagtgcagctatttaaggaaagagggggaaagtagggcagaaactatgaaaaggcctaggactatgctcgtcccttggaaatctcacgatgacttcatagatagctcggcgacgggactaacctccgccctgtttaatgaggacatgatgaatatttcccatccctgtattattgctcgattatttacttgtaattctcgatttcgctccaatattctaaacaaagaggattattgacccgagagatgttacattccttcttcttcctccccccgctttcatgtctgtgcaactccaaccaccaccgagggcatacagacaatacactattcccatttgagcaacttataggtttcgtttcatgcgcacgcttgaaccattcaccggcaaaagaaaagaaagcaccgggaaaacccgcccatattggtcaatacttcgcgctttgacgagaatcttggcgactacagtcggaaaatcagccgggaaaagtccaacggagtacagtggtcctaggcgtctgagccattatatggaaactgggtatattggtttgaggtataatacatggttactccaaggaaaattcgagactcttcacgatattcaatagaacctcaactgatatccacatgcggtgacgtcggatgaacggttgacccagttttttccccattaagtagcggccaactccatcaagccgaggtctttattcgaagtacgtctatcgccttccacgcgctctcgctctagccccgatggactatcagatcactgcctggtttgcactgcccaacatgcctgagcccctggaagttagggggaaaaaagcctcaccctcgaggtccctccgggcccgaccattggcccctcagatatcgcaagccggatgggcaattttgcaatttcgctcgaaactagttagattggccactgttctctattggttacgcgggaagaatctgatgggtgatatcattcgattcataaatggctctctatctactataggacggattatatgcgattctgcgagtttccccgatctccgctcccccatctgtaacctgcgctctccgactggctaagaccaccgctccctgtgctgattacccctctatatcttttgagacggccgcaggcgcatatccagcccgtttgttaacatacacattcacaaagcaagcaacgctaccggcgagtaacagccccaccgcggcccaagtcatcccaaggaatttctcgccataatgggctgtcacgttcgagcccctgccgtgggcattaattagagcgacgaattcaaaggcgatgaccgttgcgattatggatgcgacgctgacggtaaaagacccgacctaattttatgatatcatggtcagccatttgcatttgccgtgttctggggaaatccgaactccgaactggaaaatggaaatgcaccacgctgaactgggaagtacactccagtactgcctgcataaacgacctgcacaggcagagtttatgtagggggctaactcgatcaccagatcgtgttcgtgtatatgtcactaactcaccatgaaaaaccaaaattcaagcgggccctggcatgcgcgcggagcgagagtcgtccatactcgtacaagcatcgcagcgcccatcgcgccaatgccgatacagtacatcaccgccatgacttggcatgtcattctgaacgcgtggaagtcgtcgctgatcacgcgctgccacctcatatccggactggaggtgagctccttcggccaggcttgtgtcgggtcaaatgaggatgaaatcgcgcggttcgagcattcggtcacgttgcgcgtgacttctgtgcctgggtcgatggtcaccagtgttccctggcagtaggacatgacgtggacggaatataaatcgcgcactccactgccggtgctgtctggtgtgtagagctaaatggataaagggggtcgagtcagtcttctgactctacctgccacttctagagagtatttggagacggtcggacttaccgttaagatatccacatcgtcgaggaagttcctctgcgtccctgagaagagacataggagggtgagtataaacgcgacgaacactgccaccgtctggaataggcccttgaagtccgacatgacggcggatcgggtgtatgcgttggtctggttctggtggtctgcaagatgtagttggatccggtatgcagcctctggggatgaccacaacagatgatgcggaggctcgatattcaatgagaagacagacacccgaatctgcgattctcgcccggttcgcgatccttatatacataccataatggaagcgggatagccggcacgatcggggtcaagatttctcacgatcgcttcattccagacgtgggctgttagaaagggcggggacacatatattcttcatagtagtatcgagagttaattcttcgtggaatgtatgcattgcccgtaattgcatacagagcaaaagccatacggagcgaaagcctacagctattcgaaatgtaagtctggagtagccaggtatgatggctgggaaggggatgagcgtggtcttgtgctcttcaggaatgttgggaatgttaccagccacgaaggatcttgcatgtcgatatcgtacttgtgttttattagtgggatctggcattgatgaattagtttagataatattagatatgacttgagcatgaattgtatctatgggctggttgggaatatttcaatcttagagatgaggggatgtgccagggctatatattagaccccaagagaccccaagagaccccaagacatttgacgtcagcgacaagggtttcgtacttattgccttggccatagacctttttgcacatgtttttgcgctaatctccagattggttcagcatcctagaaattctcggcacaaaaacctcaattctgagtcagtcgggatttcagcccagatcgaaatttacccgatcaagccatttgccttgtttgagtggaaaacaactaattattatggcaaatgttgaagaaataaggaaatactcgtctcccaatacgatttgacttacttatgttcctgtacggcgtgttatcatcgaacaaggggaagtgtagtccctggcggagacttgttgagtataaacatttatggatcgctatctctagtttatttcgattgcatgtttactgctgaccttgtcaatttgcgatcaaaaggatcactgcatgaatttgatcaactatgttcttcagtctgttcttctcgctttcccttttcttcgttcgccttttcctcctggctcttcgattgtgggtggaaagccaatgtatatgcgtccgggtcccacgataagattctggtattcatctcttgcagcttgcgatctaaaagtagttccatctcatccttttgtccctcatccaacagatcaaggcgttccttccaggcgtcctcggtactttcggtaggtccaaaaaatcgcgagtcgatcttctgcccatatataccatcaaaagcaaagctgtacaacgctgcatacataatccagaagtctccgctctcccagctgtcatttataggaccggagagttgctgatcttctcgcaatcgaccctgttggattgctatatcttcacaattcttcatcgctctgaggaagatctttagacgaccatcgaacgaccttgtccagtcatcgaggccctttggccagtcctcaggcttctcaataaggtgacgcataagagaattcagtgggtactgcgtacgtgaactcccagtccaccacgccggcaatatgcatattctccttgaatagtacattagcgggccttaaatcatcacaccaaagtttgaaaggctctttttcgagtaacgggtttgtaggtttcttatccctaacgagcttgcgaaagagctgccgcgccacaaatttccgccgacagtcgtctgcagactgcaccgagtcatttctctaatgaactaaatgattgatgttgagttctgcaagcgcttcgatatatgacgaagatgtgtcgaatgttgtatgtaggccgggcagtttcgaccgcggcagtccccctagtcgaacaagttcattcatattcattgataaaggccgaagtactacttcccaggtgaagtcatcggtctggctaagggatcctacgcgaggaaaagaggggatagagagttgaagcagtactcccgccagctgcccatacagcatttcaagcttatcttcgtcgatatccgggtctaggattccacgttgccctttcggacatctcggtgtgttaagagagtcgtgaattttcgactcgtggtcaatataatccataataataaatgagctgagaccgaggggactctcttccttgtacccgagtgaagaataaaaggaacaggtattgaagtttggtcggcgaggaaccgcatgacggcgacctcattcacgactttttcctcggggaaaaggacagcaccgggctgcgatagccggatcacggtggcaccatttcggtactttaaccgcaaggatatttctgagtatggcaaactcggtagcaatgcctctgttgtgagtgaggatgaaatctgcaatcggtctgaggatgtcaacttcaagaaattgaacgagccacttgtcagacgtttcctcggcttattcccaggccatatcgtcagggcacatttgagtctgcatatttgcctcttgttcaattgatgcacaataagattagtgagataaagccgagaagagggccggaacatacagggttgtgggtttttttagattttggagagacagggttattacatgactattgggggctcctagcaatcggcagagtcagactcatgcagatgcccaaggggaagacaggaactctgccaaaagccgagggaaaggacggggaaagagtttcaagccaggagctcggatttcccggcccaagataggagaacagtatccacaggtcgaagaatctcatgagaggaggaagcatatcactgccaattcataccgttctagctcttgaagagtctgctactagtagacatcttcatattcaccgtcttcatttcgttgatgtagagtggtcttctcgtttactgttcggatctgttcctaccatttcctcccacgcgatgggcaaatggcgaaggagcaacggcgaattctcattgaagcttcttcattaaatatatttttgcatttctagaaggatgcttgaaatagaaatgcgtctctgcaatgtcgcattgactcggagaccatctcatctctaaagagttattactgttacctcaatctgaaggctccgctgtgaacatcctgacgaatcaaatgcacttttcggggtaaccttgaaatctcctataatagtaagataaatctaagaattatatagaaaatgtaaagtgtacatcaaagacaccacatatattgcatactgaagttcagctcttgcttcaaacatagttacttgttggttcttttgtcattgatactagtaacggacttcatctacactcgatatatatcttgctatattcacatgtctatgacaaagtatgcattcgcaaaagggcaacgacacacgacagacattgccacattcagatgttcctgttcctatcatcacatggctatatcatcacgttaccattcacattaagcgagactatgtcgttgtttgtctcatttgtgaatagtggcataaaccgaccgcccttaggatacctataagaaggtggccctgcccccagaacttcttcttcttttctttcttcttcagctctctttgcctctggcttagatcaagtgtagtatctgttcttgccagtttaatcgctggtagttctgcattgcagaacgtcatgattattccaatatttggacctcgcgacttggcctctgtgcttgcacacgcctcgttgcactgtgtcactgggcttacactacccccggtcgacgcgaactccttttcatcaactgttcggcttgcccgggcgcttggagaagatgtgtgcttaggatgtacgtccttgccaagtggttccattttataccttgttctgtttcgtatgtatattttgtaactacccatggtagagacagtctcccaggcaacaataatgaatgtgttgagactgtttctgtcttgggttggtgagacctgctccctaccatgtttgaacaccaatacaacccatggcttccttccccatcagaatggcatctctactaccccctgcctacattgtatcccatgtttactgaaattacaccataatccccgaaccagggcaaacagagttaccatacgtaattaccttccaaggtcggaatttttgacagcaatgatcaaagtatctgatgtaatgcatatttcaagagaagcttgaagctgccaaggaattctacaactttcaatccaaagttcttttccatctattcaaccatctacgatctgcagaaggacttgtttcactctagatcaacctgaagtctttccgacttggccagctcactattattgggagcactattaatcaaagacaatctcccatagaggtctgctttctggatcctaggtagaacggatggcagaacaaggacaagtgatcttcctagctcatctggtttgatatacgtgtaacgccttgtgtacattgttgcctgctaggcctgagttatagagtcgagttcctgttggtgtgaacaaacctagtgtgcgatagttttagtggtggtttttcatggtttcttgcttctttaaccattcaattcatctcatattgcgtgcactttgacctgattcctcagtaggcctcgtatcattagagatgtcactttatcttctgtcccctaagctgagggtcatatcctttgcgaaattaggagttccaaatgtattcgttcagggtgaatagcgaagattctgctgaacctaggaattggctcacggccaacctatttaggacatcggagacattaaggttctgaatggattagttgtggaagttgcacatgtgatcatctccctctagggctgaaattggaacatcggatgattatataaactgttagcctatcacctgttcatggatgaattagtccgtgccaaagcagggaagtgtagactgaccctaggagattacacgaaaagaacttgcaatgcaacgtatgtcgaaagttgataatgacacagtcggataggatgagccattaatatctgactcaaatgactttgccaatcagatcactaaacgagggaactttgtataagactaccagtgtagcttttagcgcgccctatggggatgagttacacaaccacgtgaagcaacatgcataacaaagagatcgaggcaaaataaaacaaagtcactagtacccggacttgaacataagtttgtggtgccgatgtgagagaagtgtcacctgggccgcgacactaattattgattattctgaacctccacgggttcgtttgagtggctgtatgaggttcggagataccgaaccctatgtacgtacctaaggttcctactcggttatttcgtcggccgatgtcgaagtagtgctatgtaccccgtatccgtacccatcatgggacgacgcgacgcggtctggacccacagaatctgtagggagtacggagcagccaagtgcttaatgcgaaacagctacgggagggcagctggaatagggcaatcttcctctgctcttctagaaggcgatgtatgccgtctgcaagctgcaagggcggcattccagacggagcatccacgagcaagacgaaataagcaaaggaattcatacatgtcttcattggtagccgagattagtatccacgcaaagcatagcatatagcgcaaacccccgaaccgaaacggaaaaaggggaacttgggccgaattagactgccgggcgcatctcatacgcaaggcacatgtgtggatacaaaagtttgtctgatacattcccgaggatcctaaggtaggggtgttgaccgagacatctaaccacatcaaaccacgcgtgaattccaaggttgacatgtttagcgctggcaactgaccacgcgaaatgcgagcacgtgcgtgttattatcaaattcaacccgtggccgaccaagccttgtagaagctcacttggcgacgcctcgccgggacgccttttattgcttggtggtcttggaatttcttgggatgatgcgagcgacaagagcaagctttagccaagagcctaggaagtcttgacatgtagatgctcgcatgtctcgatttcagatgcgttcgtggtcccaaatcggtcgaaagtatacaatcctagtattgatagacgcggatttcgcgtggcaactcgcattgatgttaatctaatcgatatcatcgagtagataccccggctagatcggaatgtagcacaacagtgacatgcaacgcgccaacacgtgttggaggtaagttcagatttcgagggaaggtgcgtaaaatggggttgcacatgttccaatgcggcccgctgattggccacagatcatgcatggacgatgtcggggttcccaactagcgtggaactgcctcagccactacgtcaatattaaatggtccagatgcggcccgttttgggacttggggttccatatggaagagattaatgggagagagattgcttgttcgctacgaggcggcgtagatattggacaatggcctcagaaaggctgcacgtgtgtcaaagcgtgaatgttattctgcttggaaccgagatgacctccggctccgggactaggtgtttggaggttgccacttggcccgaggcatccaattgcattggcattgccttggcgtgaggtgaggtttagctaaggatgcagtctatatagatcctgtccattgtcgatgcttctgcatataacagcctaattgtagatactccgtacatgtatgtaggagtaattatttattaaacatctaactcaaacggtgaacagaatttatcggccccgcgaaagtttgggaagatctgccttgaaccgcaggcggtggcaagcagagttgggattctgcccccacgtgcgcgtttgattggtctccggctgccccatatcagacccaccgggcccactccgccccacttcaagtcgaaaatctgcttccggagccaaatccagcaagagtagacccataaccgcaccgagacagggccccggagggccctgaccccgagatagagtggttcctaccttctgactttccaagactttttttcttttttgccaattttttctgagtttgaggtggagacgccactgaattgtgccgttgcatgtcgtccacgctccggttcgctcacttctcactccttcttcctccatccttttccatacttaagaagtcaatcgccgcctttctgggttgaagtcactcaccttccccaaccattgtggtcacttcgacgcttccctcccccgagttgaagcttacatcaagcaaggttcttgctcacgcgacacatctcagtacactcctacgatgaccgactttggtcctcgtgcccctcatgggcccgacatgtcgggagaccataacccgctggaggatatggatatccatgagaagggtgctttcgattctctcattcgccccgacgacagttacacccccgagggtgtctactgggccgatctcccattgtggaagaaaatcacattcgtcacctcgtacaacaacatggaggcaaagcgagagctgggtggcatttgggctatgatgaagaaagaccctctctcgcccgtctcctggtacttccgcaacatggtcctgcctggtgctggtctcggcctcgagggttacgtgctcttctctatcggcaacatcaagccgctgttccaatctgccttccctgattgctggaaacacgccaaaacctgcagtcaagggtggatctacgccattgactacctcgagatcatcggtatcatcgtgggtcagatcctggttggagtcttgggtgactggtaagctacaattggactcctcgtgggaaggagaccgtattaacgcacgactaggctcggccgtcgatggggtttgatccaagacgccgtgatcatgcttctcggtcttatcatgttgactgccgcctggggtgtgacccagaatggctggatcatctgttacgcttggtgtctcttcgtctacggtatcggtgttggaggcgagtatcccatgaccgccaccgccggtatggagaacgccgtcggctctggaaaggtttccaccaaagaagatcgtctgcaccgtggccgcaaggtcaccagtgccttcctgatgcagggttggggtcagttcttcaaccaggttgtgcttatcattctcctgctctgcttccaccacggcagtggtaacaacccttattccaccgtcgctgttcagtggacctaccgtgtttccttcgccattcccgccgtcggtactttgtggcttgtgtactaccgtgcctaccacatgaaggctgctagcaagcaacttactgctgccaagaagaaggcctccgtcaccggttatgatgcccagtctctgaagctgaccttcaagtacttcggattccgcatgttcgccactgctggcggctggttcgccaacgatgttttcttctacggcaacaagctcttccaaagcgagttcatcaaggttatcagtcccgaaactagctctgtcatgcctacctggctgtggaacttggtcaatgtcggcgtctctctgtgcggatactacatggcctctttcctgatcgacaacaagctgtacggtcgcaaatggatgcagatcgttggtttcatgctctgcttcgtcctcttcgtcgtccctgctttccacttcgactactaccgccgccccgagaacatcaaggccttccaggctatgtacttcctgagctctttcttcaaccagttcggtcccaattccgtctccttccttgtcgctgccgaggtcttccccacacccattcgtgcctccgcccacggtatgtccgctgcctggggtaaggccggtgcccttctggccgccgtcctgtacaactacatcgatacccagaccaagttctacgtcgtgccctggtttggtctcggtggtgctctgatcaccgcgctgttccttcccgataccaccggtctggacctgaaggagcaggagcgccgttggcaatgtctccgcgagggtcgcgagcatgagtaccacggtcctgccgtgcaccccaagcacctgtcatggtacgagcgctacgtcctgcgcaagtcccgctactacgatgccgaacttgactaccaacagaaggtcaaggagtaccgcgtcgagtgggagaccgccatggctgccaaggtcgccgagaagcaggcccacgagcatgacactgatgaatcgcttctcgagggccacgtgcacacatacttccaccgcactagccctatgttcaagggcatggagaagaatgtgtcttccaaacaggataccttcgccttgcctcccgctgcggagagtgagtcctcggatgcttccacccatgagaagcattcatgagaagcattaagcggctagtttgctcggtcctcaggttattgcctgtgatgtgaccatgatacctttttctttctaaagctagctatgataattccccctttttcaaaatttcaattttttctcaaagaaccatgcatatacaccaagtcgctttttacctttatgctcgctatatgaattgcatgacttttgcttgacgcaagcgagacattcgattatttagatatttataccacttttggacttattgctgtacatcttatttttgaagaccgttcattgtagtcaacaatcttggagagatgcctgaggcagagtggctgactaacatcatattctcctccacctgagacatcgatggatgtatatgaaccgaaccgcacacttaattaaatccgatgataccctaaacataaaacccaaagagaaaagaagagaaaagaaaagaaagaaccatgagactcttcgccttcggctctaatggatcaggccacctaggcatcggccacgaagaagacgtctccacaccaacgcaatgtctcttcgagcagccagagccaccacaaaacaccaatctccccgatggatcagaaatcatcaccatcgcagcaggcggaaaccacaccctgctcctaacaaccaacggctccatctacgtcgccggctgcaacgcagacggacggtgcgggccgcacaaagcaaccaaaaacccgaaagagcccgagtccgacaacaatggaaacattctgcgcttccgtcaactgatcatcccagacgcagtctccgacacagaagtatccaagtttaaacatgtttccgcgacgtgggagggcacgattgctgtagcgtccatgccacgacgcggcagcaataacaataacaataactataacgtcgtctacggccgcaatccaaatccagatacagaagatcgagtctttgtatttggctcctcgcccaaaggggaactgggtgttggtccagacacccccgccccagtcccaggtatctgtatcccctcgttcccaccagcggggttgaggatcacagcgctggcgagcgggatggcgcattcggcagctgtgctctcgaatggggatgtttatggctggggcgcggcgcggaagggccagcttggggaggagaaccgcggggctaggattgcttattcgcctgtgaggatttgcgtgccgttttttgcggaggctgttgcttgtgggagggagtttacggttgtttcggggcgcgggcggttcgttgttcttggggatagggagaatcggtggggggtattgcggattccggaaagtttgtctttgcgtgtggatggaggtttgggggatcatttacggggtgaggatgaggaagggcattgtgaaggtgctattcgttatcgatatactggtattgcggctagttggcatggggtttatgtacatgctgcgcctgggctgggacggatggaaccgtcgataacggacggggcgttatgcaccaagtctcgatttgattctgattctgattctgtctctgtcggtggttccatcgttgcttgggggcgcaatgatcgaggtcaacttccgcccccggatcttccgactcctgttagactcgctgttggtagtgagcatgtccttgctctcctaggagatggtcgagtggcggcgtttggatggggtgagcatgggaactgtggacccgatacagattcacaagggaatgtgtcggggacatataatgtgattccgctccccgaagccgtaggagtggatgggaaggttgtcggagttggagcgggatgtgcaactagctggattattgtgacatgatcgccggaatttgggagcgtcaaaggttgttgacaactgcactgcccctgacagggtgtgtgtgctcagtcgaagaaaccatattggcgaacctatcaactatcagcatacgcctatcaaagtgtcgcaagagccagaattcacatacctgagaaaaacgttgtgttggcgggagacccgtctcatcgtttggctcatcctctctcaacaaggcaggctccgcatcgcgaatagttgccccgaatgcgtcctgcgcgtttgtttagccacccactatacccactggggaagaaagaaaaccacatacctgtgttcccgacgcatcccatccaagaatatcctgcggctcctcttcgtccttcatctcatcccactgccggtcatcatcagcaggcacgaaaaggctatcgaattccatcgaaagcccagacgccgccggccgatctgcgctagccctctggctcagattctcctgcgtagacgacccattgagaggacggatggatctggttcgcggtggcggtggaggcatttgcgtatttgtcgtcaccgatgggcgagtatcacgcgacctgctcgctgagattgggataggcacgggcgtttgccgtgggattgacgctcgtgttgacgtcggggcgtcttcgctatctgcctggccgcgggtcatgactgtgaattctgcgttgatgccttcaaatccgtactccagctgcagaggcttgcagggtcgggtgtaccgtgctgttacggtggcgtttgccgtttcggcgtgcgcaactacggctttgaagtcttttaggttgatcgcgacgtgcatgttctcttcgaccaagtactcttggaagtcgcgcgtgtctgctgcaacggatgtgtggacagggtgttttagtacttctgtttgggttgttagttaaaaccgctaagatttgatggaggcgaactcgacatacccttgccttcggtgatctttgttgtaaaactcgtgaacaccgctctgccggaatcggagtacatgtctagctgctcggcagataagctgaagtgctcaatgagctgcttgaggaaccgtggatcagctgtccacatgctggtagctctggatttgtcgaagatggcgtgctgaatggccgctggttcgtaggtcaacttgtatgacttgatcacgcctagataaattgtcagagatgtgcagtgaagccaaaagatggatatatgcaagggtatcttacctagtccacagatcattttcactgtcagtctacactcggcttgctgtagatcttcatgcaattccatgtcacagcgttcaacagctgtgtccttgtttctgtcggttttcccacgaaatatggagagaagtgcctgtattctatatcagcataaagtaaggaagataaccacggtaaatatgcggtatggtacagctccaaggataaaaaagtctatactcactttgttatagatctggcagaagaatcgttccagcgaaacactgccacttctgtcattactgctggaattgaaagaatacgcctcaaagaatacctccttctcgaacgtgaaggaggcaaaccccgtcttggtagaattgagcgcactgaggcggagctggagcacggttagccagaacatttcatctgctggcttctaaaccttgaactgaactaaacaccccaagttaagaaagataacttaccatatcaggctctgcttcgatggcgactgtttcgctgaatttggacaggcatatcaaggcgtcgtggagccggaccaaggctaacgggcctagcgacaatgagagcgacgtcatggctgcgcctcttggtggctatcaaatgtgttcagcctagaaatgatgtgtagatatcaatttacgtatcgcatggcgctcatggcgcgctgttggctgttcgagattcgatcgagtgagaagacgcggacaaacacatgcggcatagcgcgcaggctcgttttggcctgattgaagcctgaatgtctgaaatttggcctgaatttagaccgcctttaggcaaacgaccctgcccaggtgcgcgctagggattacataagcttgtacagaaatattgccggagttcaccgccatttaaattctgccagctcactatgactacaagtatcagagatgtgcagtcaacacagaaaagacagatctatgcaagggtatattacctagtctacagataatcttcacagtcagtctgtgaggtgccagatccatcttgaagaagaaaaaggagttcattcgactaaataactaagatggagaaagaaaaagaactaagttgcaaagtggaagcagccagttgatatcagctggccacttcataaacgttgcaaacaaccagccttctcgctcagtgatctaacaaacaatctagtttactatagaatgcgaacaagcgagcaagcaaatatgaagcatatgatatctatccttgatcgtgacatttgagatataaatgtaacacatgtcgaatttactatgcgtttagagctggaccacttatgtgaaatacgttagctaggtatgagaaataggcagataagagaaaagccgcacaactagtggctactagaattatgttgtatgtcaatgtctctttgagattaactagaagaacgaatataaaccaacggaaacttgcaataatcgtatctcaacataaaacatagattcatatagacatttaagagggaccaacaagggactctagtctactatagacagaaccatgaagtaattacattggagcgaggcattgcatcgcctgaaaagcaaatactgtagcagcttgctttccgaatcataaatgataagagccctataaaagaattttagcgtcgttctctgtaaaaatgaaataagaaatcccaatgaaactaaccttttgtcccaccatcgattggatcgttataactagagcttaggcgtgataaattccccaagtcatcggggtgttgcccgatttagtcacggtctgacaacccattgtacccttcgcaccaatttttcctttccacttgaacttggcgatagaagagttgatgatgtaaataatgtcctgattgccaacataggcaatattcaagacctggccgccttgaataccaaaagcacaggtgccatactgagccagctgatgctgcctgcccacggcagggactgtccaggtaccaccgccagcaatatttttgacaagtacctggcagtcagctacgaggggagaatcaccactgctttgattgatgaaggttgaggatccgcagtcgttaatggaagctcgtgcttccaagcggggttctttgggggccaatggagcagcttggacaaagaccaggagggtaacaaaagttatagaagtgggaatcttcatggtgaaggagaaaagtgttgcaaaataagttccaaaaggctgttaaggaagagaacgttttctgacatggaggaaattttcataggttatagcaggattctgaagcccttttatatccattaattctctgcccattaatacgttcatgtcgccgaggattttagtaaatgagttgacgtgagagttgcttccgatttggagaaagcgccaacgcgaagtatccagactaatggtatagtagccatttgacaagtatgctgtggagcactgctagcatcaccattgcaaatattttagaatattgattttaagttagcaagattgacctcattacgacctctttctatcactattagatgtccccgaagccccaaaggcagcaagagggtcagaactcaacaagaaccatgaggttattcgacgctttattgcgtgcacttcaatataattcaaattaaggatgtggtgggactgagtcagaggtggattgaagtattgagccacgaatatacctaggatgataaagatccctgcattatgaatgagcttatattccagcctatccataattagtgaaggggagctgtaattcctccgtgaggctgtccatactagactcccttatttgtccccctcatatgtctatatggataggtacacgcgtaattaagaagtcttctagtaaagacacttttcaaattgtaggatctatagtgagtggtattggaaccgggctaatcgctctcggttgatttaacggtcaagcggtgactgtacatgacagatatggagaccatactataacgcatatatggggccaactagatcacagtttgtgacttggacacacatcagatacatattagaggtatatcaaagtctcataccccatataggtccgctctctgtaggcagtactcccgaggcacatgactagtagccgtagttttctacaacatagtctaacaagagtagggatttggtatctgccaaaggccatggatctaggacggctgctccgtagaatgtgggcactctgtggctcctaaccttccctgatattaactcaattatgagtcctaagttgttctttgcacgtttccctaagaaggatgcggtcatgtcaatgtccgctaaccccacagtgtacgggatagctgtaaatctcaataaacgttcggaaaaaatccgagctcgagtattgtaagccaaactagtattcctggggagggataacatgtgatggtgtcagagcgtttgctaatgtaccagcgtgtactagtgtgcaactatgctctttcgtttcgttttcatcgcagcccttgctaagctaacgctaaatcgtgtctccgtcagtaggtctattctcaaaatattgaactaggatgagggtagttttgagaaatataacctgccctggaaaagcttcgagccgcgcgaaaacccacttatggcactattatagctcttcttttagtccccaaatatccaggttgcagcttggagagactcgtaatgaaagtggcggtggctattttggaaaaaaggaagcatagccaattaggaagaagagacatattttatatgcaacataccacctttatttgagtgtaattgcgaaaagcgggcggtatgcgacagaagaactatatttttaacgatagactccatagcgcggcctgcccctaaccaaatgtgtaagtccagaatcagtacagaatactgctaccaggcctcaatattgagctagttagcgtaggctactttgtacacatgggctgacgggcagatgtccaaatggccttagttatctgaggtagtttagtcatgcaaatagtacttctcacaataaaccatagtatattacggccaaatgtgcctgtcaggatgggcacaatagcgcatatgtagcgagaaatctgtcaatagccaaaataggcaaatcgggtagatccggagatcgcccttaaaggggattcttgaggcttaaatgcgtgaattagcaccgctgttcacaccgccctgtacgatgtattataaattttaattacaagttaaaaatatgaagctttccgtcccagaaggcttcaatgccgagaaataagggaattctaggcgttgtgtcacatttgacgcccattttcgaaggcattaatgttttcgacgatggcgttgttatggttaattcagatctttcaattttctgccgctccaaaataaggcagtcaggcatcaagcccccccattttggaccctgtggttcatctggaaagcgatgcccggcccagcccagaccgtagataccatctcttaccttagcttctgtatatacatatggcttggcccctttttttctcttttttcgccgtggctttccgattcaccggtgcccggaatttgtccatcaagatccactactccgtacttttattctgttcattgcggagcgaagcgtagcaattaaatcataacctcgtgtatgcatgtcacgtgtccagatggtttgtcctatgggctccaagatcagtagttttcatgcggtgaagaagtagctcggcgaactttggcagaataaccccaccggcagaataaatagactagagaatgaaccatcattgtcttccccagagcttctacagtcacactttgcgtagcattagaagttagaatcagtcgttttgctctgcagcgactatcgggcggccgtaggccgtccagatccctcgtattcagcactccgtagaacggattcatctacttttccagtggcgcagagatctgccttaatttccctaattgatcttagttcttagtaatcttagtaatcttagttcttaactagtaactattaaattattttggcattcctctcttttgattcatagcataccagctagatgctagatgctagatgctaggtagccaatagtgctccggggcctttactatatcaaattgaaagttaagaggcccattgtagataataaatcaatttgagtgtgtaaaaataacgaatcaagtaacacgctatttatgagctagttacaaaatctgggtggttagactgtttcttatactccgtgcgtacgggctccggagtaagtaggtttgtgttctaacttggacctttctgccttggcctaaagaggaatattcccaaaagaaaataataataataatgagaatataatttttctttcttttcaagggaaaaaaacacggtatcatggaaaatggtccagagttgttactaaagtagagaatcgaaaaaccgcagtttcaaggaccattatttgtacaccaacctataaacaatatgattctgatagtatgagcctacgtctatccccggttgtcctggctcagaaacgtagttcagaaatataagttgtgggaaatgtcgagaaaaggtaccatttgtatggcaataccatacaaaaggcaataccacaaaaggtacttattctactccgtacagatttgtaactaagctaattttttttgcattaaaccctgcggcccaactcggaaagaggtgtattgagaccgtatgtatcagttggtaggtgggcgcattgtatacattagggccaccccgtgcagtggagtctatcatttggccccgggctttgctgagatccctccaaggagatcttccaatcacactatgcttatcaacttctttctaggctggaagtatcttctgccagcgtgggacctggatcttgcttactttcattgtcgcctttcacaatgattttgaaccgcctagttcccacttcgggactttcagcaatcagctcggtccaggtgcttcggaattttcttttctttctgttcttctatgttttactcatcatggccgcacgcagacagtcttcccgtgacccatcctcaatatttttcgatccaacgaaggcctatgatcctgtttattcagctatcaggcttgagcaggcagcttctttcattgatagagcgaacaatgccacagagctgcagacaccaaagggtccacggcatcctaacttttgcctgggaatcgccaccattgcgcgaaagggggtcagctatttccaagctactgtaggcacattccttgagggcctgagtgaggaagaaagggcagacatcttcttgattctattcatcgcgcacacggatccatcacagcatcctgcgtatgcagagccgtggttatacaaactagcggatcaagtgttgctttacaacgcctccgaaatcgacattgatcatatacgctctctagaaacaaatgaggccaaaatagcaggccgtgagaaggctctctttgactacacatatctgttaaacgcatgtgcaaacatcgacacgccgtacgtcattatgcttgaagatgatctcgttgctttagatggctggtatcatcgcactaaagctgctttgtcctctgcggaagaacagactcgagaaatgggagcggcgaattgtgagttttacagccattatggaactccttaaatttccttgctgacagttttcttacccagggctatacctgcgccttttttataccgaagaatactttggttggaacgctgaagaatggcttacataccttttcttttccatccttgtcgtctgcttcgtggcctgcgttcccctggtcttccgacaattcaatcaccatgcccgttcctttctaccgaatatgacaataattatttggagtggtatattcacaccattgttgattgggctcttttttgccacgggccgagtgacgatgctccctcgagcaaacggcgtgcatcaaatgcccagatttggatgttgttcgcaagcttttgtcttcccccagtcacggataccggaacttgtcgggctatacacatccaagcatatcggatacgtcgacgtgctcaccgaggaatatgcgaatgcgagaaatgagattcgctgggcagtgacgccaagcattgtacagcatgttgggcggaagagctctaagggtgttgacaacgatatctcatcacacgtcaaaatcaagtcaaaggctgagttgacagttgtagagaagctttggaatttcgagtttgagatgaacgatgcagaagctttgcgcgcggaacatgatgctgtgaagcagcgagggggttcgtaatgctcgattttccttgtacatcaactttcagataaaagctgtttttatcctcttgatcattctgtatgtgtataatctaaatcaagagatagcgctggacaaaattcgaatcgtcatcaggtcgaatacttaatatcgatctacgatagattgctatcatatgcttcatgtttgttcgtttgcttgcttgctcattgtttgcattgtttactatattagattgtttgctagatatctaagcgagaagatttgatgtttgcaacgtttgcaaagtgattagctatatcaactggctgcttcccactttacaatttgcttcttctttctttctccatcttcattatttagttgaatgtgatctttcttgtttaagatctggtgcctcaaaatgagggccaactatctttttgtattcttcaccgggtgtaagaacatcggaggcaagcaaaggcgatgacgtccccccttccgaatactattagcgaatatcaacggaaagtcaaagggccagcaaactcactttctctgcatcatcgtaacctaaccaggctcgataaatcttttcagggaattgagacccaaacatgtaagacattttcatcagaatgtcattgtgctggttccagctccagatactatcccgcccagcgctgatcttgccaggcttgcctgaattagctctgagattgagctcaatcggatttgtttcgtgcgcatggtaaatgggctgaggaacctgaactgccttcaacccataataaagagcccaggatgtgggggacatttcagatgctaatcctagacctttttcgattttatccgcatgcatcagccggagtaatcgggccgagacgcgggacatagcgacaactgatgcccggcgcggagtacgtcccttttgacgaaagttatatacccggtcagcaaagggccagtcggtatgctgagggtcaaattgaggcagccaggtgatcacgtcggcttcctcacctacgccccagctccaaaaatcatcatcattcgagtctgagttgaagtccgagtgcaccggctcaggtgcttcatttccaacctcgataccttgtgcaggccgtgatccccagatactatcaagacctatcatgctctggtctacctgatcgatgaagttatcccagctcccgtggacagcaggtatataaaagtatgagttacgctcccacagattcttacgaggctgttgtcttgcaaaatctgctgcctgctcgagaaagttatagaaatgtccggtataacgcgaatccatttcaaactgccagaagaagtcgtactgtggattcacccgcgacaaaatctgcattggctgaaagtattgaagtatggccctagaaattattaacatttcgaaattcgcctgaagcagtatagaagagagctagaatgcgatcttactcgtgaatatcgatcttcgggtaccagtcctttagtatctctgcgttgaaaaatactgccaaatcctggagttcccgcggaagcgactttttcagactgtccaagcctaccgtatcggctgggtgaggcaaatcaatatcttttgcatcaaccaaaaggattacctcatattctgcgccagataagagtgacagctccattatcatcgaccggatataataaaaatcatcttccgtgtattccctgccgagccatgtacgcaggactaccgcggtgcgtgatttgagaatagcagaggcattgtttcgatctgtctgtatcttctctccgctccagcgatgttcatctggttttttatcatgctccttgtggagagtccacatcttctcgccaattttcgaaggttgataacggttttcattgcgatgcaagcagtcttgttgcaaagcagcccaattcacatcctgccactgcacattgttgcctttgttgccttcgtctgcttcgtctgcgtagccgtatggcgcataccgagaatatcggtcggtgcagagactccgatcaagcttccacgcctcgtacgatccaaacataggcatcggaaaacctagcatgctatcagtgctcgctgcactactgtatgccaccataggcttgtcctcattccatacctgactggttccaacgaaaccctttcatagctgtttccgcattcctacgatccaggactagaccatttggaccaacacactgctggtaagatcctttccacgtgtcgttccatgtagtgctgttatattcgggatatggatcgtaaggtatgggtagtggctcctgcgaagtttccaaaacaagctgaccgaggtcattcccatcaccagcagcgccagatcctaaataaaaggcatttcttctactacaaagagatgggtatgttagcgattgcacgaagactgccatatgaagcgaggcctggatgtctccagaagccctattagtctagatggtcaagtataccttgaagcatagactgttgggctgcgctgtgctgtagtagcttgctctcttggccaacgtaaaagtacgaaaattgtcaatgcaaagctaaacgcaatcgcaataagactgcgtttgagggaagtgcgccataaatgtcggcatcttagcacgaggtagtcaacgatgtgcattcttgagatagaccatatgatctaaacagtgttcgtatgcatggtgagaggaaaaggagaatgcacaaacacaaattatggccgtaccatgggcatatatcccattggcccccaatattgggagcctacagaattccgaagttcttccgggggtccgcagttcaccccgtggccccatggatggatgtgtccggagtacctgatacgtaagtggtaccacgtagtaatttacatgccagcgggtacctagacggcgccttacccgatatagtctaaaatagtgtccagacagtacccggttctcgccaagcaacccaatccctatatctctacgatcactcaaataggaaaaatctcactaattagtatggcctgtttcttcattacaatattctatcttctgtggtatactttaatcgaaattgattaaagctctctactggaaaaactagcctgtacaaaatatacaattcgagaattcggcccccatattacttaaacaggttagcttagtactaatcaacgtcgtaactaatccaacggtaaacgaactgcggtcgacccacccaaaacgcgccataaattaacgcttacttaattcaaccaattcgctcccaatcatctacaaagttagtagagaaagagggtgggatcttagtacctatccaggcctttaaatctcttcaattcgtggattagcccgcaccttcaacgtcgtacacgcctacgtggtattcactaacgcgtgacttcacatctgcaaactgctatacattgactgaaacgggagaggaattacttcaaaaatgggtagtactctctgtggatctacgtgcagccggccttccggcattcttcggtacgaagtcttctctaacactaacaattaccatccgtgggctaagatgcgaaagtctaaactttcgagcgggtcggcccgatccatccgtgttcattccaagcttgttgctatgtaacccatcccataagaatgaaaggtgtaaccggtaagaaccgtagcctaggggtttcatggagtcgtatatccatatgttaaacaggcgctgatgtcaaaaagcttggggtgcaagaagacatggatatgaatatatccagccccaattaaggcttttatgtacagtcttggataaaatgccagatgataaatgaaaaagaaaacataaaacataaatatcgtaaataaaagagggtatattgcttgcgatgtaccaaataagttttcgtaccaagttgggaatgctagatatcaaataagtcggatccccctacccaacaccaggggcgtttcctgtgacggggcgtccctccgcatcagctcgtgcaccttcctctctagcatttgtattgatcctaggatctgtattaaaggcgcggtcttgctcctgatcccgctggggcaagggctgcggaaactgcatttccataaaccgtcgtctgcgtctgccggctcgaacagcatgcaggaagttaaccccaacctgggcgaagaagatggctaggaaggcgccaatcacgaatccctgggagacatacgtttcgtctttttgcttctgttggccactgtcgctggtttgatcacgttcgttgggtatttgcgagctaagaccggggaacgaaaatttggagctaccaaacgagacggagacagagaaagagtacattgtcaatgacgtgaatacttgcggcgatatcgacgtgaaaaatcccgacaatggccgcaatgctaaagggatgatgcagaagatgaggagagggacggatagtcataagacagagtagagtgatgagcgagtagacctaatcggaaatatcagcatagcatctaatggggagaagagatgttgaacctaccagtctcgagcctcaagttgtctcgcccattttgctgagagtttcagtctctctcgaacacttgtggcggcgagtaagggatatttctcttcttcggagatgggcaaaatgcttgcgaaccaccatgggaagcgggctgcatctgtggggatgggtccatatgctagcatgacgcgcgggtgcagccaaggagccccagatctgcgctggttggtaatatactctcttgctgagaggagtagctgttgagttggcattgagcctaacggaggatcagcttcattcccttctgacagagcatttacaccgcctgttgaggtctccaacgactcaagtcgctcctcctctgcgagcgagatgtcatctacgcgctctgttttggcaacataatagccatccagcattcccgagtcgacgatcttgaaccgcgatacgcctgtagctaccacgagactgcgaccatctggaagcagctcatatcgctcgatcatcaatagcgttccgtattgcataaacggtgcgtcatgtaattgacctggctgtacccggccttgccggttgtgcatgaccatgccgaactttccatttccacttgcgagaacccgctgaatcataagtcgatatctgggctcgaagacatggagaaaagtgggcattgtcgggaaagatagcgtgcacacaaaaagtggcaagctcttctcgtaatccgcgcctgtctcatcctgggcgctggtctcccgtctgactgagatctggtcggggaaaaagtattcgaccaaccgtgccaccggctggtttatgggctctgactgtagatcattcggaatgcctagctttcggcgacaaatgggacacagatctgtatggtttaagacccgcgcgacacattttcggcaaaaagtgtgaccacaaggcgtcgtcatcggatctaaaaggagtgcatagcaaacctgacagtctaactcggcgcagagactgtctcgcagcttttggaagtgaatgagatcctgaacttctgagcttccggctggcgttgtggaatctccatagatgacttcgcatgcatcagacgggaaccggccttccagtgccaggctatagattcccctcaaccacccatgtcgcttcaaatgcccacttccgttcttattccgcccgtcggttttccagcgcagtaacggtccgtcatcctcggacgagtccagaggcacgttgtctgcctccgaccccagtatttctccaaaaaggccaaccagcttcccaagcagcacatcagcgccacaatctgcaacacaatggtccccaccacacgtcttatttcctttccaaaggcacgtaaattcctgattcctcccctcagtcacggggtacgtaatacctgtccggggccgaagggcgggcaaacattcccgacagatcgaattcccgcatggtaggcggagcggagttcggaaagggcgggagcaatgttggcactggatcaattggatcacgatatgaggtagatctgccgtatcgctaggtgtatgttcttccgagctcgaaacatctgagcttgagtcctccgggctctccattacggtcgggataggttcagtgtcggtcatttgtgtcaggctcagggactcggctgcatcttccattacactgcagtccacgggtacaaatgcagtgaataagagggaaacgtagaaggataaatgatgaagctcggggggtgggggatccgctatctgcaggtgctcaggtgtgggtcaactttagataatcggatcagtgaccatcccgaggtccggtgtcgcagtacatcgtttatagtagtggttatacaaagaaataatattaattgcgtaacgaaacgaagcaaagcaagtataaatcaaaaggtcttacgtacgtgtcacgtggccaagtttctcccagggctgaaataatagcgttctaatgggccatcatgtgatcatcagtcgcttcgctctgcaaccatccatggatgtcattctcaatgatataggctgtaaatgcatccgacttattcttatactaattatgcggaataaaactgatgatgctgctaagcagtgagcactcaatcggcaaccaaataattatgcattttccaaacgcccaacaagtctccgcgcgatgaaaagaatccgacggcgtccatcccacaaaggatataatccaaccgtcagcaaagtgatccagagccaaatttcagcaaccacaacccaggcgatgaagaactaaatcttgtcagtgacattgtccacccttgagaaaatatagtgcacttactcctctgctgaatataaacctagcaccatacatcggaagtggccagagaacccagtggccgaagaaagtagcaacggcccaaaataacgcgtatcgtgaccatctcctttggcttgactcggaaagctggcccgcttcatttctctctttagtaacctcggtaacttcaccctcagaatggatagccaggtcgttattgctcatcgacttccagtcgaagtcttccggtgcaatcaatgtaatcaacacggagtatagtaacggactaactgcggatgccactgtgccgtacatgcatggcaatgtctgtccagttgaagagactgtaacggcaccatagaaatgatgtgctgttccgagccagacagcgaggcccgtggctagaccgagatacgccgatgcaatgaccgcgatccggctttgctttctccaaagaatcgacagtatcaggggaaatatcccggggcaggtgatgactccttcgagttatgttagaaacatcgagtatatccttgatataagtacctgagcttaccaattatgtaaagggtccagcccatgtcaatgccaacatagtggaacattgcagtgaggcctgccgcgacaaggccgaatataatcactcccacccgactccagaagattatctcttgattgtttgcattcttgttgaagtaggtgcggtagccatcaaaggccacaatcgaagagacagcaatgacctgtgctgacagtgtagatgtaacagccataaaagtcatcaggagagtagccactgcgccacctttgcccgctaccgcgatggctgcgtaaggcaaagctagtccattcgtgacttcagtactagtcatgggctcgaaatatcttagcttcaagatcaaatatcgagaatcgatggcctggacttactctcggatatgttgggaaggcctttgtgctctccaatcccaacgcaaccatccccataatagttccaagagcccaaggaatactgaaataagataaacccccaatcacgtatccaggaacgacaccttctggggacgcagcaaatgccttagtgaagtatccggtatccatctattcccaattagcaccaagccgtcagtaattcggggaggcacttacaatgacagctccgaagtttgacaccaaaagaatgattccaaaaaaaattccctgttgagatgtcatggtaaaaagcgagccttggtaatttccatccacgagatgatttggctgagctgcaatgacaagatcatacaaacccccaatcgacttgacctccacgctggtcaacgctttggtggtcaaataacaacacagaatcaaaataatgaaagtgtgaatataatcagttagaaacctgcaaaccctattagtgctgtggacatattttgaaaaataatctgacatacgttgctttgatacctccagtgagggtataaatgaccacaccaactggcagcaggaaagtggatgccatgatgtgcatcccagttctttcatggtaagccgattgaccacaagtgttttcgagcgcggttaccggacttacaaatatgtaatggcgactgaagcacctaaaatcatgttgatggtgttaaagagattattcaccacagccagaaaggtgaagcttaagtgagcgacagtgccttgaaattgttagttttcatgtttcactgacagacacgtaaagtcctcaccatatcgcatcttgatgatttccagaacagtgtgcgcgctgggcacacgctttttacagacagtgccgagatacgcaaaacagacgatcataggtgagcatccagcaccataccaaaatgggccacttacgccgtattgataggccaccaatacggcactcagcaatgcagtgctccaaagccaggactattgtaggttagcactgaatattgttaagcatttgttcacatacagatacaactgccgaggcaactaaacccgtgctgactctccgattggcaacaatgaatctagttgggattaaaaaggagtcagatgagaagcttggggaaaaacatacgtttcagcattcgaattatcttcgcccactgtatttttcaatgccttggtgacaaatatcattccttcattattcttagcatagtcataagaagagttgtgtatttacgtcctacctgctgcaaatgacaacccaacaccaatcacgactccataccctacaccttgtgataacgggggagatatgtcggacatggctcttgaaaccacaagctgaaatggggtagaactgagcggaacaataatacctggcaattgaagccatcgtgagatttatatggggtctaggaaatgtcggctgagttcaccttaatctcaagctccaaacattgttccacttgaaaggcttttctatgcaagctaaccatttcaggtaattaaaaagagaaaactcgctgctctagagccaaatgtgagcaatatgacgtgctcggcgtgcttcatggcggagcttttcagcaccgcaaataaccagggaaaatgatgcaatccggcaatttggggtcaatttggggtcaatttgtcagtgaaatatggatagttaccagtgcctggataaacatagaaaggtcctctatatggtctagactattagctacaaaaccgagaagggggaggaatatgtacatctgaaaagacggccgaaaagaataccgcaaaagacaacgaggcatacggagtaggaggccgactattcttgtagtcaactattgagatttgaaatggagttatgtaattgagaaacgtgtgtacggagtagttaggggattccttggtcaatgtgctatggagcgttatggtgtcatagtatgcccaaattactatacaaaacatatggagcgagcaagagaagaagagagagaaactcgggatcgaggaattcatgtgaccaatcttgcaattaatcaattctcagctcccgagagagccgacttcaacctccgtaattggagttgttggcgcgtgcagaagcatgttctagatctattagcgcagctcattgtatggttattctcgggcagactgattgctccctatacaaaagcatttctaatcttaggccgactccatacgtttctctgaacataaagaagaatcaaacggaaacaaaaacacatgcatccagtatcagtcgttgggtgatggtgtcggtcctgaacgtttaatgatctttctgatcgaggctaccgtagtcaaaacgacggctgacctgtgcatgctgcttggtagggtaaggtgttgataccaactaacatcccatcaatcactgctctagccgacagcacgtatgcgacgatgaagcgcaaactgacgatttccttggtatttctccctcccacaacctgagccatatcaggaacgctatgagaccctcgatatctaagatgaaagttgcttaggattactaaaatgtaagcgttaagcgatccaccgaccgctcccagggtgtacatggtagttggaatggataaaacacccccggcgaacaaaatcttgatgaagatctctgaagtctttattcagcggacggtgtgatacttgattccatattctgtgtcgattaatacctcactctgttgaggtagcttccttgctcgggagtcggtgtcgggactcggtgctcgctctatatcggtcggtttgatatcggagttcctcggatgttgggtatctgtgatcgttgcctatttggaaatgtaactgaaacaatatgtaactagttacgattgattattctgttgattaaacggtaaaccacgctgtaactagttaactgtaataggaaggagcttgacagttaccccgggttacgaaggcccatagcgctcagggttcaaacccccctattctagagcggcagaagatttcaatacctgaattgccattacttatgtcttactaatcaaagcacgggatgttaagcccaaaggcttcatattttgaacttgtaattaataaatttacaatacactgtatagagcggtgtggagagcggtgccaagggttttgaagctgtaccgggtagattgccgtcggcgaagtcaggggaatacggagtagataagcatgcatgatcgatgcattatccatccactactcatgcattgacatatgcgggaaaaatgtggctacaggattcgcttaaagagaacaatcaagctgtaagtccgagacaggacagggcaatatgtaaatacggggtttgtccacaatggagaggagagcgttatcggtggccgacggccgttgaacccccaatatcgaaggtaggacggccgacggcgatggattcccccaacggggaccatttatatactcttggttagcaagaccctgtgaacaatttaaatagactctcgtctgaccaattcaactactctaaccgcattcctcattcctcaacacctgctccgtgttgttacacactgatatttatacacgaaaatatggcatcatcacaactttctcctttcaaggtgaaccagacacgactgcttgagtcgctacacacaagctgtcaacatggctctgcgcatccgtatggaaagtaaggtactcactctccggctttcgacctatgctgattgtgttgttatcagtgactccacggaaaccggaatggctaggctcagtctaacggactcggataaagacgtaagggaatggtttattgagtctgcaaaagccattgggtgtcatacctacgtcgaccaaatgggcaatctctttgcgatccgtcccggaaagaataaagatgcccctcccatcatgatgggttcccatctagacacgcagcccactggaggacgatacgatggtatcctcggtgttgtcgccggcttagaagtactgaaagtactagaagagaactcgttcgagacagaaggaagcattggagttgttgactggactaagtatgtttcctccgataacatactgaacacttggctaataccgtacccaacagtgaagaaggagcacgtttcccggtgatggctatttcagctgctgtctgggccgaggcaattcctctcactacggcttggaatctgaaggaaatttccgccggtgataacacaacccgcaagaccatgaaagaggaactcaatagaataggttatgtgggagaaacgccagcttctttcaaggccaatccttttgctgcccacttcgagctccacattgagcaagggccaatattggaagacgaaggccgaaagatcggtgttgtgcaaggtcagaagctctcgactgattggcgattaaaattgaccattccaaggtgttcaagcgtttaaatggttcgatataactgtcagtggcagggatagccacgcaggcacgactcctctgtatgcgcgtaaagatgccatgctatgcgccgccaaaatgatcaccacagcgaactcgatcgcaaagaaggccaacggtctcgctacgacgggcatcatacactctgagccagggactgtcaacactgtagctcaaacaatcaattttagtctcgacctccgccatacatttgacgaagacctcgaaaatatgattgcagactgcatggctgaattcaagagaattgcaaccgatgatagcgagcgaggctgcaccgtcgaatggaaggaactggtcgatagtcccgctgttcattttgacaaggattgcatctccatggttgaagaaagcgccaaaactgttcttgcagatgtccctgatccaatttccgggggaaagcagtggcgggatatgatcagtggtgccggtcacgatagctgctacacaaatcggcggtgcccaacgagcatgatcttcacaccgactcggaatgggattagccacaaccccgtggagtattgttctcctgaagactggtaagttgtagccctggaaaaatctgcttatgatcatggctgactagtccagtgctcttggtgccaacgtcttgttaggcgctgttttaggatatgacaagctccgcgcgaaacgaggcgactttgcgtaagacaggaaagtgaacaaatgtctcaaatatctatcaagaatcaagcacacgatgaacgagacagaagctacataaataaatcaaagaccttgtgaaaaggagtaaagaatggttgacatatagtgtagcagcatgatgcttgaccaggcacgagcttttaaataatgttgcagctcgagttaaagggaaaatgtagcgaattcattggcaagagggctacacttattcaaggattcaaatagtctacttccttcgagttttagggcaaagtaagacgaggatgtgaaaaccggcttaagagttttccgcccccggttgtccaccaatcggcttcttcttatcaatcccctccctcacggtcaattctcgaactcacgatactatcgaggtaaaatgagcaaagataggagtgaaaccgctttcaatctcgataatagtaccccgacaattgaccgtgtcacgaacgcacgaaagtatcgctccaaagtacagaggccatgcgatttgtgtcggtctcgcaaagttcattgcaatatcccctacccatctcagccatgtacactctgcgagcgtaccaggcgatcttgcacatttgtggaaaagaccaaccgtaaacccagcaagaaaaaaaccaaggatttcggcttatcacaatcccctcgatctgacggtctctttggatctactgcaggtgacctagtcccatgtacgactgttgctggtgcagagacaacatctttcgttgtttcaccatctcagagtgatggaagtcaatctcaacgacccctcggcacaggtagtgaactaagctccacaaaaaagctttgctaatagctcagtgcagatgatcattttttatccgacatctctggtatgcctaacgaatcactgctagacaatcccctgatcggaactggctggcctcgcgatgatggcgttgactggcccacgttcaacaatgaagatttccagggcatgcttgacaccttgggacgagaaaccatttcggaactactgcctattgatggtttcagtactgctgataacagtccatcaaggtcacattctagccagcctggaggctcggaagagttgaccatcgatcagaaacctgacttctcatctcaaatttttggattttcgggcgagtctgacccattcctcctgcgaaattacccgtacgacgattcaggcgaagtgaagttcttcaggcttatttatagaatggcatcaaatacggccgctagtcccgagtccgaccatacggttcctcctgatggccaccagaggagaagctcggctggagacgtgcctgtttattttctgcagaaccatagccaaaccgtatctcagtccttgcaggcggtcgaaaagtgcatgttcgaacaaggcaagcacgcaccgagaatccaactcgacaatctcgtgagtccagagatgggagtgggactagtgaagctgtatataccatgtgctctcaataccggattcccttgctaatgttcgaaggtattttcggtacatcttccatgccctcccggttctttctcgatccttcgtctttcgagacatcaaattcttcgttaaaaacgcctcggtcgggcttcttgccgccatatacgcactttcactacaatttactgcatgggacgacgttctttgcgttgacaacggatataccaaaccgtcttcagaagacttatggcgcatcgcgtatgcctgtgtgcagaaggagatgcacttcccacggctatcaacaatccagacttctcttttactcctcaacttcgacccttttgatccagcttccgcagagaatccttcggcgtgggctttggctagctcaacgctagctattgctcagtccttgggattgaatatagaccctataggctgggatttaccaacctgggagattcgtcttcggcgacgtctgtggtggtgtgttcttgttgaacacagttggcgagccgtcactcatggacggcagtctatactttcctacgatagttggaatgtgactcctcttactttggccgactttgaggtcaacctgaatcctgaagctgggcttgaggtggatgatggttgtccggattactttatgcatcttagttcactcacgcttattgccaacgatttatgtcggaccttcttgtgagttcaaactcgttctgactttccccttcttagccactcttgtcgcgttccatagccgtctttatcaaagacatccctgagttcgcctatattcactaaccgcaccaccagctctctccgctctgtctgccaacaacggtctttggatagcttgatagatcaggctcgagtgtttcgtcaacaactacatcagtggattagcgcactgccagagtcgctgcaaatgccagcaccagcacagacacactcagaaaccgaggaagaaccagtcgatactcgcggtagtttgcacatctcatacttcacagttcaaatactgcttttccgtgcccttttacggccaatactcgacgacaaaatagggctggatcaccttcagccctccgttgcagccatcctagacgcgtcgcgtggattgattcgcgctgtgactcgtttagtttacagcctcggtgcccgacatcaatcagccttctggccgacttatacgagatcatgcttttcttatccggggcaattcagtttcatgctgtgtttccaacatagagagccgcatatgatgcttaatgaccagaagctcttgggtatttggagacaaacattgcgtacccgcgctccgtcttggccgcttcttcgctttgcggctattcgtgttgatggcatcttttggaaaaacttggtcaatgtcgcggcagcttcccatgccgttgatacctcaatatgagcccttttaagtgaaggtcgctagtaaaaatcaccgatccttcaagatcttcgccaaaggctccttcggaataccatgcggtgattttattttacccctgaaatcggcacaatgacggtccatggcttgattgaggcctgggatcttcaccgacagtccaatcacataatcaagccaagaaaaagaacggtctttgaacctcaggcttggcattttaccttcagtctggatgcaagagaaattgtactgtccaaatgtgtctggattcaagtggcccaataagatgggggatcctttccttgggccgtcaaaatatgttcatgtctatctactaaacccaagcggtctcaacgtcccaagacccctcactcctactgcccgccatcatactctctgtgcgatgcaaaaactgcccaaagcctcgagaacctacaacccctccatcttcccggtcccaaactatatggccacgaagcacagtgtagcgcggccactgctttaccttgtgcccctcgaatggagtgtagtcgacattgtgatgaaggatgtcgttggtgacagtcatcgcaagactcccctcggggtaccagatcacaaagtcggcatcactaacctccgggataagtgcaccttttctcgggtacatgccatacaatttagctgggttggttgatgtcagctccacgtatttctgtatattgagtcgatcggccgaaagaaccaatggcattcgggtctcgacaccagagaatccgttcggaatcaggtgaaactgtccatcgggacgttccgtagtcacgcttgatcctttgccagacgtcgagtcgttgaagttaaacgggctgtgatcggatgagagaatggtaaatgttccgtcctcgagaccggcccaaatagcctcatggtcggatttgttgcgcagcggcggactgcaaacacattttgcaccctcgagcccaggccgatccaggttctcgctgctgaggaacagatattggggacaagtctcggcatagattggaagaccctttgcctgagcttgtcgaatgttatcgacggctcgaggattagatacatgtacgattaagatcggagtatcaataaattcagagagacagattgcacggtagcttgcctcgatctcagcgacggcagggtgagaagccgtatggtactttggtgcgtatagttggcgctcgtgcaatttcttggtcatccacgcaatcacagagtcgttctcggcatgcaccatagtcgtgaccttgtgtagacgggattgaaacaagacatccaagaattgctcgtcgttgaggcgcaaagcttcgtacgtcatgtatatcttgacggacgagatgcccaagtctcggaaggctggaaattccgcaagcgtctttgcgcatgggttggatatgatgagatggaacgagtaatcgctgtagcattgatcctgggcacgttcgtgagcgcaagctagggttgcgagaacactgtcttcatgcttccgttgaggtgcgaaggccacgatggtggttgtacctcccgcaatcgcggcgcgggtgcctaggaatttcagtcaattcaatgcaacatgttagtcgccagctctgaatactagggggctcaccggactcgaaattgtctgcagtcgaaccgagtccaaatagaggcggctcctggaggtgaacatgggcatcaatccctcccggcttgaaagaggtcagcacgtggccatgagttcattcatgatagaggtaaaaaaaaaaccaaccgtaacaagagctcccttggcgtcaatgatctttttggcctttgagccagccaatgatccttgggggacaattgagtgaatcttctcgtctttgacgccaatgtcacattgcacgacatcttcaaccgttgccaaagtacagttcagcacaatgaggtccagatcaggattcaattgttcggacatattgggagataaataaataaagaatccgtcttaaatgaaacttacatttcggaatatcaagctgttcagaggggggttccactctcgaaccgccgtcggcgtcgttatctaaaaggcggggcatccaggtctgcccgtcggcgaacaaggcactttagatttggctcaaatccatgcatggaaatattcggcacttttataatgtcgttgagctaattggaacacctttgtcattagcagattggctgtttattggggctagccctttagaatccccgtatgcaggtttatctttgttcttctctgaccttattcgctcagctatgtctattagaagattcaactactaagttgtgatggttgacctgggaaccttgggagtattgtatgattacatagaatacatagctaataatacacatgaacgagacaccacagacgttgaaagatcattcaaaactggccaccaacggtacgcactgaaaagtcggccgccaagtgctactttcgttgtcatattgattgcttgaaaatcccaaatatagttgattcgagccgtgtggaaatggtgcgagatcttcctcggtgatccacggaggttgacactcattctgcctgaagatgccatagtcatgtatacgagcctcttcggggatgagtgctgcttgcgacctagttgcctcgactttgtgaggaagtgccactgtgttcacttgcctcagggcagggctatagccctcttccagtttcatcaatgtttccgacaaaacagccacgggagcgcatttgaaaaatccttgtatcggaggcgcttgtcgcagtagatccaaagcccttcgccgcaggcttgggtcacgacatctcaacacagtcatagcgagagggacacccacactcagctcaaaggtaaagggtggttgggcaccatttggccctactgaggtatcgagaatcaacctagactgctcgacgatagtaacgaagtctttaaagtggatatcgaaaacagtttcctgttgccttaagcatcctgtcacacaaatcaaagtagcagcatgatgcgtgagcaggataggctctgggtatatagaaacattggatactgagttttttctctcgcaagtattggtgtatgcccgatgccattgatcgagacgagctcgaagcgcttctttttttgcgaccatttctggactaacagcggaatccgcaccgactgctctgaggtgtaatttcgcctcgcgctcaaaaagagcaacttccgcagctatggcggatataatggttcttgcggaatcggcagatgcgaaaccagcgctcagatctgtttctacgaaggcgagaagttcagttggaaactgagtccctgaaatggtgagggaacttgtgcccagtcgcaggaataagggagcaatgctgcgttccaacagaacagccttactggtagatattcctccatggccgatttgggcacggaggtcaagtatcaaaatgatgccttgtcggtagagctccaaggcctgctccatatgtccttggattgtctccacacagatgaacagtgcgcagctgatgactgcaatgtacggatctgcgctgcctcgctggatctgtgaagaaacacccgagattgatcgcgtgtaccatgtcaatgcttcctgctgagcatgatcaagcaaatgtgccttgtttcggcgatctctcaaaaaatgaaagtccatgcactgctttggattttcgtacaatgcgctaattgcaatcattgcatcccacacagcgggctcactgcggcagatctgcggaacaacccccgtccagaaatctatattcattccacctgcgagatgttgggacacatgttggaagtaatattcaaatgcgcgacgttctcgtcgtcctggatttggagacgacagttcgaggctgggtgtggagggagcccagggagatacccctctgctctcatattcacacttccgtcctgtgctagagcagcgaaggcaattgggcttctcttcgccacatttgactcttcggattctggtcggcggtcagagcttaactccgaaaatggcggaggaaactcttacttgcaggttttgcatccagatcgagatttcacagcccctatacggtggctcatatctgaatcaggtgggagaaggcatagaagttcgggatcccacctacacgtaggtatggctggatgtggttcttagtccacactgtggaatactggacaggactacgggcaggacgttgaccgccctcataaagcggcagtccatcgggacggagtaaccacctcgacaggtctacagccctggtagacagatttgagcagtgctgcctccaggaagtatcgctgatactgtgtgggaaatatacgagctggatagcactggtttgctgaccaatgtcaaaattatactgatctacgccggtcaggaaatttgaggtcctatatttttaaaagtcatagattggacatgcgtaaatcgtcgctctgaatacaaaaagccaagcacccaatcagccgtcttgcagggtatatttgcaggacaggaaatttcaaatatcaaggcgtttattctgactgggaagtagtagatgagtccgattccgagtcggaatcttcatcaaggacgattcgtcgcatgacactcttgtcgaataagtccaaggcgaaacgtcgagctgggagtctataatgatgactttccagaatgcatagggtcttgcggaagagatgtgcttggtggaatcgctccggttgtttagattttaggctgtggttgagaattgtgagcaaatgtaagaagtcgcggaatgaaaactgagagccatacatgtgaagatcagaagcggctcttttggagagtaccgtgttgcccatatcgacgatcaactttaagatccgctgattgccgggatcggagtcggtggtggcttccttgagtttctccttgggagttcgcttcgatctataatcaaagccagggaaggaaatctagacggatgagtacaatgagacgaaagtgaagggacagaagatactcaccaagaataattttcggaaatcggtagggagacaaagtcccagtgaatctcccttttggtcaaccccggaatcccagcccaaaccccgcaggacttggagtccgtgtcgactgcgagatatcaagcccaaaacaaagaaagcagtgcctcgcatagtgagaactcctgcactggttgctatctgcacaatccgttggataatctcagcatccaagaatggtgcgccaagctccattgagccgatattgccgacagcccagaggcatcctttagctttgagaagcatttcgttgtcttcttcatccagcctgaaatcacgaatcgtccaagcaaattcattgaaatggcccgattgttctagtagcttacacccctcggcagttcgtgcaagttctcggtagaaatgcggtggtaccaacccaatatcctggaggtccaccagatcctcgggtacaaggcttccacggcgcggttgctcgacgtaagctcgggaaagagctgcctcaacaagaccgacatagctatcattgcggccaaggaaccagtcatccatctcttgggtgatgtaatcaagaccatccagatagtgatatcccacggaagtcgataggaatctgagaagtagcggtgcaccaatttcacctagatgatcaagagagggtcgacatttgaccacgaactccagataatcccgttgattgcatgcttcttccagaattttcacggcgacctggcagacagtgacctcgggatcatacaattgggtgacaagaagtttgaccacccattctgcattgtcaatcgccacttgaggcgaaagcgttacatccccaacagcatatttgcgtaggaatctggttgcaaatattcgaatatccttggagccaattgttaacgccttggagagcatgacgcggagatgactttcgcggctgtaatccatgtttcctagcaaagtctgaatcagatcgttgcgatcttgcaactcaatgatgtggtaaaacatgttgagcatatgccatcgttccatcatgagcagcccgttgacatcgccgctcaatgaccctagcatcgcaaagtagcctccactgagagtattggccatctggtctttggagaaaagcggggatgcagacgtcagaccactcatgcggtccagttgggccagacattctgcaacctggcgaaggaatttgttctctgccagatacttggtgccctcgggggtcataacgagagtgcgcatgagaacacagccggttcggacatatcgttgatttgcttttgtgtttggaaccatggcaaagcgatatttgaaaggtcggtaaaacccaatgagacgtttcatgaacttggagcctttgattgcctcatccattctttttggattcgtaagaggaccctccactagacgatgaataatatcccatttccacttattgaagttgacggtgttcaggacatgagtctccagaatagcattgcggaactgggtctcgtccatggaaggactcatcttgtccttcccttgctcagcagggagcagagagactgataaatctgtctccatgttgtatcgaccctgcccactgggatatccaccagaacgcgccaatgtccgatttatactatcgatttggaagatagttgcggttgaaaggtcgtgattctcagtttcaaagtcgactgcgggtgggattaggtgtggaagcacttgaagttgtgcgctgacggcttggggtaaagaatgctgggcaagcttgagaacctccgtcaataacagagttgctttacgtctgagcgagagatccgattcatcctcgatgacgtcggagagaacctgtattcggttaactcttgcgctaagccaggcctaggggtaaaaaaaatacatacctttgggagccctgcctcaaccaaaccggccaatatgagagtagagaaatgagcagtcagatcaaatctgttgctattggtgtcattgagagcgcggctggctcttgatgtttcaaggtcagagcgaagattcgagactctgccataagttgtgagtcttctgcccgcaaggaaagatgacgaccaggacgggggttttattcgcagagcgtcgaataatagctccattatcaagtctcgggctataggatcattgtaatgaagcgaatcaaggagagaacgcaacggttgtgagtcatgtcttgcaagaataaccagtccgggccaagtcttcagcatcgcagaaatggctcgcgctgccgactttaatcgcccactgcgtaatgtgtcggataatgaatccgtgaaaggcgtaagaacagcttcaagttcagacccttgaagaaacttccgactacggggggtgtccacaacatgcagaaaacttgatatcagagactctgaggcgccgaacgtcccctctgcaagcgcgtcgtgcagggcagcaaatccaccggcagaagcaaccagttcggggtctttgaccaacatctcagccacggtcatgattgaaatgttccgaagacggtcttcatgatgttcagcaatagcaacgatggtccgcacaacggcgcgtgatatctctcggacaccgtctttgacatccaggaagcctctcacaaacttcagggcctgttccctctcaatgcttgccttggtttctttgaccagggacaatatcaccagctcgtcggtgtggagtgttcggatgatttgtagggatttgcgatcggcgatagcatagcgtgttagtcgataacccgcagctaccacctctttactgtcacttagaagcataacttgaacgcgtaggccaaaaacagaccacgcgaggtcatacttcaatgtgggatgccgtttgaataattcaaccaagctattggcgcgctcgacatagaaatcaggcgacatcccctctatctccaacgcctgcagcgtttctgagaggacataggttggtgactccacgtcaccatcaccatattcctccctatcaccatttaccgatccgacggcatccttgtttcgtgatggtgagcgcatgggactggctcggaaaaggctcgaaaggcgattgccgcgtggaggagtcgatgccggcgcctgcgcacgtaatatttcttcttccaactcatgctgcaattcgatcagcttgcggttcgatgagctcaattccgactccaccttgagacgctgctctttcgtttgctttggtggttttgctagcagtgcctccagcatattctcggttccgcttttgatcttcatttccttcgcgattctgtctcgaaggaaagcctgtcgctgttcggttgtgtgaaagtctgcctcgccgatcgatctgctcgcacgtctgttatattggtcgtccggccgaggcgtgacactgcgtgaagtggtgcttttgagctccgaactaaagctccctggtccaccgatggagggagctaacgagggcgccaatgatcctccccgtccgcccatgttgctgctccctccagactcggatcgcctgttcctcccgattcgtgagatactgtcctgccagctcccatcggcagagccgccatcctgactgagcgaggatcgtccatcacccagtgcacgatgatgagtcgacgcggagtatgctgagttgtgcccggaagccatagagctccatccagccgtgctggctcgctatcatctatcgcaagtgttctgagtatcggagggctgcattgaggtcgcttgttttagcgggagggtcgagcggagcggagcaagggcagtatggggaagtgtaatggaggggcgcggtcacaggttggttggtgatcaaagggaaatagtggccatttccacctgtcgaagggtgattgaattttaacttgagcacagcagtgatcgtcgaactgctcttgttgtcccactacgagatgctcggctcagccagatctggagaaacaaactgctgactaagggatcttatcgctccagccctggccaacattgcaacaccacgccatgctgaagagctgtgttcctactaaaggggttttcgtctcttgttgagaatggtctgatcattcaattgattttcatttgattatagtagaatctgaagatcgtatattctgataaactacttagtatcccgctctttcttcctaggcttgctcatactgatgaatacctacatgtaggtattttataccgttatcagttcattagttattgggggtagtcttctccaggatggtcttcatcatctcattgccaagagtggcagcttcagggaaacgcggcgcgaagtactccgcaatccgctcaaaccggtgacggtaggactcaaagtcaccgaaagaaacacagtcagaccatgcctgttgatcacatcaagttagcacgaactggagaatgggatattgcgaaagacatacccttgcggcaaacgtgaattccaaatcatccgagcggaaggtgttatcatcaattgcggtatccaatgcctcatccaggagatcctggttacggaacaggtattcggtcacacccaaccagagacggaaaagctgcaggatgttaatataaccgcaatctggcaatatgctctcaatgactgtatacataccggcgtggaacagatcatatgatcgtaagggacaatgccgagtttcgaccagcagtcaacaatagcaagcagactgagatggctgttcggcggcgccttcccgcgcggccgattagacagagagaaccgatccagcacctcgtccttcaacagcagatcttgtccttcggagccaggtctgaagactgacgcacctgcagcctttacccgaagcttgagctcctccctctgtcctccaatcatcagtttgtacaaatctgtgaccgactcggcgtactggcgaatctgctgttttgccgctgggttgaggatggcgagcccggcatagacgtgccacttattcgagtagatgcgcaaggtgatattgattttgacattctcgataccgcctacccaccgtccatgctcccaggggaactgattgttggcctgccaggcggttcccatgctcaggaaagcagcatgggtgacagcctgcgtatccgcggttatacggtcgtgcatctcaccggtgagatagacatgtttggagccgaacgaggaaaggatcgtctcaacgaatttgaggctttcgtctgaggctctgtgttggatgaagacctaggtcaccgcgttgttaatgcatgtccgagatagaatagaatccaggcttgaggttggtcataccagaggctgaccttgcggattcactttggggccgtgcagcgaatggcaagatacaatctctacatcggggggcaggtgtttctcgaatgcggcgagctctggagctttgcaggacgtttggccaccgacaatggcaccgaccttggttgcttaaatccgagtcagaaagtgattgcgatggaagcagactagcggctctggttcgacacatacataatccgtactgcgccacgaccttgtcgatggctccagcctctacactgtacagaatgtaatcgctaattcttgagacgagatgtccattggggaatatggtgactcctttctatatatacaatgagcttcttgagcttttgggtggcataatcccagaaggggacgtacttgagaagcgaactcttgttttaaagattcaaaattctcaggtctatcacacgcgtttatccttgatatcaaaatgcaacgttagttatgtcaggtctaaaggattagttgtgatgaggctcaatgtgaatctgtaaaatctttttcacttgttagtgaatgttttcaaacaacagcaaagtgaaggtgtatagaatgaggttgaacaggatcagacaaaaaaaattaaggtagcgtgggtgtaacatcaccgacagccagctggttagccatcaaccagaatggtatgacagcgccaaccaaaccgtactcgagccaaatgcactcatgtcatcatttgaggggatgggcaaagaaagacggatgggataggaagcttaccatttgaggcattgggactgcggcgccgaaaaaaaaaaaaagggccatttacctccatcctgcgtcgctcaggcgttgggcatacattttgcccatatcacccataccaatgatgccgatcgaggcatcttctttggtgcgacccatcgcgacaagtgcgcctaaaacgattgaggaataatatgtggcccttagagccggtgaccaagataaccactaaaggttgtttcggaccagttgaggttcaaacttgaaaactgctcgagtctgggaagatcaattgcaatgttagagagaattcagttgggcgaacgaaaaatttaaatactgaccggagccaggaccttcaccgcccaccgggccgactagagatccggatatagatgcatgacacctgaaccctgaggaatccggctcgcttgaaagtacgaaccaatcacaggtcgtaattttccctagggcacacacccacttttttcttcaacatccaagtgggatcagatccgacttttccttcctttctgtattccatccacactaaccaccaaaaacagtcgcaatggcccccaagaccaagacccccgctgccgctaaggagaacgtctccctcggccccctcgccggtgatggtaagttaggaacaaaattcgagttgaagaagttggggaaaaaaacatgagatctaacctatcttcataggcaagctcgttttcggcgttgcccgcatcttcgcctccttcaacgataccttcgttcacgttaccgatctctcgtgagtcgccctccacccgcaattgtcgtattagaaatcgagcgcaattgaaatgaacgtaacacgaaggatgatgttggctgaccaattttgattacagtggtcgcgaaaccatctgccgtgtcaccggtggtatgaaggtcaaggctgatcgtgacgagtcctccccctacgccgccatgttggctgctcaggacgtcgctgtccgctgcaaggagctcggaatcaacgccctccacatcaagatccgtgccactggtggtaacggcaccaagacccccggtcccggtgcccagtctgccctccgtgctcttgcccgctccggcatgcgcatcggtcgcattgaggacgttacccccaccccctccgactctactcgtcgcaagggtggtcgccgtggtcgccgtctgtgagcgtgtgcggcttggtctttccctttcccttgcaagtcattgcattgctggattggaggctatttgcgggcttctcctgcatctgtggatggaataaacgcgaggaacggccttgatcgcctggtcttcaatttttttcatacgctgaaaatcaactctcgggttttgctgttggattaggtagtgctaaatcaataacttgacctatatatcctggattatagcaagctcctaatgagctcagttgtaagatgatagtagttaccctctagatttacgaggcctggtgaaagttcccgtgggacatgtggatgttcagacattagtttattgttgttgtacagatgtgttatgtatcgtcctgctctttaggacttcgtttgcaccttcgtgtatcatcccgcgaagcatctacccattgacgtctgaatttgtgcagtctcaattgtaatctctacaccttataaaggactcttcttctgtccttgctcctcttctttttcttcctccatcaccttttctcttcctcttcctcttcctctatcccctctcttccattgtctatcgtctctctcctcttgtcaagctcctcctttccatcttaggatctttatttaaattataccccttattcacctattatgttcatgttagggtgttggcaaggggattcttttgacccttcgaacctttttgtgtgatatttggcattgtttttgccgggaagttcccaagtatacctcctcttctctcggtaatggacaaagccatttgacttggtcgcgtacttttagcgtgcctgtctgcattcttttttgagtgagaaatctgatcacagttaagcttattgtgcatcaaccaccatgccaaaggtgcacgaccaagtcaaacggccctgtctcctaccgagagaagaggaggtatacttgggaattttatgattaacacaatgccaaatgtcacggaaagaggatccttgttgattcttaccttttcttagaatttgttgcttgtattaatagctatgtggtaattctataatgttctaatttctagatgatataattgctttgcttcgctccgcaataaagtaaagacctcgggaagatccaaaaaagatcgcctcccgataacagatagaactgcgtttatccgacagctcaaagtacgcaatcggttccaacctctcctcacagctccaactttccctcaaagcttcaactttgtgcgcaatctccaacacaaaacgggtgcaatgtccacccaccaccccaccccaacaatcctcctcccaggccttcctccaaaaaccctcgtcggcatcgacctcataaccttcacatcaacccccaacttccacggaatccgtgacctttccccgggatggcacttcctctacaccggcgcaacagagaccctctctttgcgcagcggcgcatggttctacattggtgacatcacgactgcagggaaaggcagtaacgacacagcgctagtcgcgcaaggccacaaaaatcaaacccaaaacgcatcagagccagagatttacatctggaaatggagcgtgaatacagagtctttggtagcgctagatggtgagagcgcctcatctctccaagagagcatgcgctacaaagcgaatctgggttcggtctggcagagtggaggacttttcaaatatcgcagccggattgcgccctcaatgcttgtcaaacccgtgacagaatcagacactggcgaaaagaacgagcaagaccaacccgaacaccaaatcgaagctcgtatccagaccgaagatgattcgcaaacagaagagagcgggcggagggattggtctggactaaccgaccgcatctcaccgagccttttatcacgcgttatcggcaaaccggaggttgatgtggacgggcatccgcgatgggcgttgtcgtctgcttcaacggccaactgtgacgcggatcatatccctggcgtcgattcgccagctgaagggtcgcacgagccagaaccggaacgagaattcggcttcattcccgttgatttgaagcggacgtggagagaaggcgctgtcggacgcgaaaggacggaagctgcgaaggatcggtcttgggctctgggagacttgatcgatcggtatgctggggaggcttctgggggaaatcagttgcttggagaactgcagtttacgttcctcatggtgctgactatgatgaactactcgtgtttgcagcagtggaaacggcttcttgagctgattcttacgtcccggggtgcaatcttggatagagaggcgtttatgagtgaagttcttcggatattgtcgttgcagctgcaacgatgcgacgatgttgatggtggactatttgagattgatggtgatgaaggcggggctttcttgcgagatctactcatgaagctgcgtcagtcagtcgatgacctcgttggtgacagtggatccgaggtcaagttagagcttgacaagcttgaagagtgggtgagggcagaatataactgggagctgcgtcgtgggactgtcgttcgccacggtatgctccaattggaggacggcgagcaggtcgaaatggactgggatgggaatgacgaggatgacgagactggagagtatgctccggtaattgttgatatgtgaaatgcgagaataggacatcgaattggttctatctctgcgcactcatgagatgtgtaaagtaattgacgatttccttttggtatctagcttgggtgcatttactggcgtcttgttacattttacaataaccaaatgacaagcattgaatgaaacaacggcatctatgaatgaggtctaaaatctctatatacagttcaaccctagcatcaaagataccaaccacgatgctaagcttcatagacctgcataagcggcgtcaatcaaacagcttgcgagtctaaatctaaaatcatctatgaacgctttatttatctattgtccctcgttctcgatggtgtaagcccattcatgttcttccttgccgaacataatggcctcgagccacgacttgatctgcgcggcatacccagcaggttcgccattggcgcccagggtgttgatatcagtgtcctcgttgtggatcaaggcaacaggggtaatgaagtactgaaggacgtgacgttagcatatcagctccaacaaaagaaaatagacaattcttcaacttacagcagtgccagaaacaaacgcctcaacaattcggccctccttggaagccttctcaatatcatcaatagtcaaagtgcgctccacagcctcaagcggcgcaagctttccgacaaagttctgcgacaaacgctcgcgcacgagctccagaacactgcgacgggtaataccgggcagaatgagctgattgtcaagaggagcagtaacaagctccagcttgccttcggtgttgtgccagacaatgaagaagttactggcaccagcctcggtgacctggcggtccggcccgaacaaccacaggatctgatcgtagcccagagcctgggccttgccgtgggcctgcaaagaaggaccgtagttcgcacccagcttggcatagccgaagccgccgggccaggcacggatggtatcaggggaagaggcgtagagtctaaggcccttgggggtctcggcttggggatccttcttcattttggtcatgtcgggccaggggacagcaataatgaagaggagggcttccttgggcacttggacgcccaggtgaggaccgtttccgatgactgttggacggatgtagaggtaagaaccggggttggggagccagcctagagacaattatcagtggatcgctctcatttgtattgtaggcaaggatagcctggagatatagtgatattggaacatacgagggccgtcgatctgcagtagcttggcgacaagcttcttcacctcatcgtacttgaatccgggcagcgaggaccgctgcgaactggtgttcaggcgtgcgccattgcaatcggggcggaacaggcgcagctttccgtcgtatccgcggtacgccttcatgccttcgaaacattcggtggcatagtgtaggaccgaggctgtgggtgggatgctgaggttctggtagggcttgacctcgggggtctcccatcccttggctgcggtccatttcacggtgaccatgtggtcggtgcagtgagagtggctcagctcctctggggagccgggcaaaggcaaatcgcggaggttggttgagcgagtgatattgaagttggaggcatccagctcagcgacattaggagcgacagaacccatggtgagatgattgtggtatgatcagggctcttttttggatgtggaggaggagaggttctatgagtcaccagacggtcaatggatgatctgaaaggaaaacaaaactggcggaaatgaagctaccttttgaaatatgtcttgcacaaaagaaacaaaagcggtttgccccggagaacccatggaatgcccctcccaaaccgttttcgatccaaaaaaaagttttcaacgccgaacggttcgcctctctctatttgccaccagaaacattctacattgcacactgttatatatacgctgtgtgttgaaggattgatctctctgaaactatgttgaataacttccaactcctggaacggtctttccctctactatgagcattctatgaggggtcaaatatttgctatcttcaggcccactttcggcatctccgaggctagccgcgttgatattcactcacaattgtagtcttcatgttcttatgacagtctcgttcatattaactagtccgatcgtactggtttatggaattacattgaaagtcttggctctgtagtctgcatgatccttgcatgctttataccctcaagctttgctcggggtaatatgtaagaagcatgttgccttctagaatacatcaatgtgtagtactccgtatatccaattgaattgatcaagcatggcaaaacaaggcctcgaacaccctcaaggaaatgatggtgtactttgtaccccagtctacaccaatcataatagctgaatgatatttccggctatcgtatgaccatcttgaaactcgatcaactaatgaactatcacaacacctaaatgctatctaattgggttaattgggtcaattgggttcatggagcttgataaagctgattttgggtgatatatatatcacacagcacattgaataccatcaacctttctatatattatatacaacacaacacaacacaacatgtatatgtatttgtatctagtccaaaacacaaataggttattgcgaccttatccccttcctcgtttattttctagctccatcttaacaatgtatcctgtacattaaactctattcaccatggccacaccttggcggttatattctgcatgtctccaagagaaaacaaggcaatccaggctttcattcacaattactctttaaattcctccctacaacaagtggtaaggtctcagagttccagcctcattccaacccggagaaactcctaccctagaggcccattccttgacattggttgggtcggagaaggtctccgtgccattcaacgaccaacgacaaaagcttgggtatgatacataatgcacctcggaagtgatatctgcagccacccaggtgccatcctgttatccacggtggtctgatggcaacgttgctagacgggacttttggatagtgttgcttcccctcgtattcccaagcgagtcagagccatggccaccatgactatcgattattggaatctggactagcacattcttagcttatcatgaagtcagaaggcagaggccatcaagatggagggtcgaaaggcttgaattgacggtcgtcttgagcctggaagatatcgacacggtaattgccgaggctaaggcgatgtcatatagaaccgaatcgagcctctataaacttgcaatcacatgccgggtgttgatgaatgtggaatgtgaaatttgagctgactcttttcaggacacggtcgagtgtatattgccctatcagaatgcaatttatagacactcgggctcagcgcagtggatagaaacatgttctgggtacttaacttagtcattcctctgagttattcagaaacctttcggtgtttagtcgatatgtgattcgacttgggatttgaaagatagatatttcgttatattgaagagcccacagacatggcattgatcacctgggcaagaacgacgggttagaaatcatctaaaacgtgtggaaacaactggcttacttctttattgtataatatataagttcctactgtcaataataacgaaggaagaagagagaagaagcagacatccatctgaaaatgctattgtaggaacaaacaagatggggattcgtagtatggatgtaaaatgagtaatgcataaaggaagaactatcacgcatgtgacattatttgaggacatagatatcctcgttctattctatggatacatctattgtaatcgttcttacccggaaggtcagatagctattgaccctatagcttttgaccctaccacgaataatcccatgacgactacattatgtctcggagaccgacatactatccttgacagagcgtaaaaacaagaataaatgacatgaatcatggctacatgaataatagttcgccaaggagacgggcggccgatcggtttgagaaaaaaaaccaaaacgtaagtgatgatgggggaatttggctcattatcgaggcgtacacaataaagaagaaatgcatctgtaagggtcctcgataagggcgagactactccgtactgtcgggcggttggtcggcagttatgaccgccacgaggtctatacaatatagaaggactaaggcgtgatcagacgctgctgccttactatatgacagatctcaagccaataatgcagactggatacggacatgtgcataagctgaagcatcgcttgctgatatctgacgattgaatacaggactaggctaaaatctcggggtttgtcacagaaatcaagacctaagaccgggctcagtaatatgacgtatatgattagctgcgaactattatttctggctgatcttagcctaaagagcatgagtggtgagagaaaaagaaaggaaaagagcgaacatggcttgcgtatgttatacggagtccggaagtagaatggcaggtgtcagaaaatcaatccacccgccgtgatatgcaagagccgagtttattgggactgcaaaagcaaagatgcgaaaaaaaaaaccttggcgacgaaaaaattggatatgtgaggatcaaattactccgtataccccgctgcatctgcaatgcattcacgggccgtggattctctgaaagtgaaaaaaagaaggggtctttaactactccgtaatagaaagaaagctaaatgatgtgtctatcactatttatatcggagcagattatagtaaggactccgtacgtcccaacaactattcagactcagccacagtaacatctacacaagaacagatataataaacctaaaaagcgggggcaaaggtggtgatcgctaacggtgaaaacatccgaccaaccaaagaaacatggttgctttttccgaaccactgatgagaagtaaaatgacctccagcctcactttgtatatagaaatagacaaatatacttcgtatcctcggcacatcgaggtaggggaagggaacagacccaatcgaagagagataagcacatgcaattccgattcaaaagtggtctggtccagaatattcaaatcggaactaccgagcatatcagccaaaactataggataaccgcgttttcttgtcccgcttcacgctacttctgcttttggcaggagtcttctcctatagaaaggcgcgggggctttcatcacacatgcaggtgatagagattcgtaactcacgttacattgcaggcaatttggaccttcgtgtactgtacttttggttgcaggggtccgaggaaaaggtttgttgggaatctcgatgcccaagaaacacgggaaagaagagggggatctcagccgcatagcagatctcactggctcgtgatcccggatctaaacagggctggaacttgtcgtgcggagcgaggcacatatatcgtgttatactttctaataacctcaagcaatacgatgtagagcatcggagccggcgttatctcttcaaatttcagtttatcaggcgcgtaagcggcagtacgcgacgctagcatgtgtagttcattttcatttttccttttttttggtacaaaagaaaataatttattattctccgcggagcccactgggatggggctagtttggaacggcccgagaatctacttgaacagctagcgccggactaatatactcactcctgttgggaaaagtattccatatagtatcagtgctccgtagtggggctccttgtatacacaatctacaacataatacgatgtagatgtatagagtacaatctagatattccaactcggaaaatttgcctagctaccctctctacgtggctgacaccatccccagcgcagcaatgcagtgttgccgtgagaatgccaactaggccagtttctcgatgaaagtgacagaatgccaagaaagaaatgtgttttgtctatgattccgattggctgttattttaaccgccaatgaaaaccgctggaagaagttatgtgggatgtatcgagtaaagtgtcgaccaaagtgatcaaaatggccaaggggggattgtcaagagcaagaaagcaaattatagggattggatcatgacaagatccaagtatcgagatagccaaattataattaaaacaacatcgaaggggataggatgttcaagatgttccccctgcaaatcccgattcgatccacagcgagaaaaaaaaaaagactttaagacgggacaaggttctaagattgtattaccggagaacggagtaggcgtagtacattcatgaatacgatgtacgatcttggtacatagtaagtccacttcatcacctaggaactccgcatcacagcgtgtagcagcacatctcgtggtcgtcccatcaaccggtgtgttggaattttcacctccttcgtgcgaaccctgcctgttggaacatttttccaggcattcgcccgggttgaaatcacaattccatcttggagcgaaggccgcaggtgtcagcctggctggttagtagaccgggtgatatccacaaatgcttacccggatacagttttcctaatgtcttcccaattagtccatgaagaaagtggctgaaagtggaggttatggagtccggtatatggaattgatatatgagctttgtagttagttgaagttagttatagttataggaaaacaaatccggcgtcagtgtcccaaacccggcagtatgacggggccggcatatctggataatccgatcccagtcttttgccaagtgagagaattagaaagacaatcaggggtagtagaatcatatgttcagaggaaacgccatagaacaagcttgacaatgagctccaacaaggcatgtattccgagagggcatcaaaatacgcacatcgcagagatcgcgtaccgacgccccagagtctcctttggtactccgtctccgtactgatacatccctggaggtggttttttttctctctcattttttcccgtccgtttttctgtctttcttttttcttttttctttgtcgttttttgattcgcccttgatttttgggggggatttagtatctcgtgctttgattcaggctggcccgaaggctttccatattcgatctgccgaatctcttgacagtatctcccaggcctcgactcgatggcccctccgccatctgcatatcatcggcttatattggcaagttgatgaatttgttcgctctccaatcacagctgaattcgagcttggactaccgggttaccccggttgtatgacgggcgtcgaacctccccttctgtttgctaaacgcccccctcgcttttgggatcttgtcacctgcaggtgaaatttggatcagaccgattccagaatagtttcttttagttgtgtcccaccttcacgcgtaaataacgcaccgcaccgtgacgcccgtatcattgcgacatgacacttaccccctttctgacatccagttggtgagacgttggagacgtcgatttcgatggcctataagaggaagcgctaggaccctggtttagcgctatatagagagttgtttgcctgcactttttgcaaaatcactcactatttgtcaacatttccgccttgctcaagattcaaccacggtatatttcggccataaatctcgaggcacagccttttggaaatcatactcccaatggctggtcttttgaagatgaagatgaagatgagccatcacgacaacaaaccatttccggcgttggctccaggtccgccgcgcctgttcgctccgcagacgtcgactgctgtcagtaggccaaagaagaattctacggcttgcctggcatgcaaagcagcaaagaggaaggcaagtcgttgcatcagtgaaccgtgaacccctgaattcccccctctttctccctctctctctgtgggttgtcacaaatcttggaacaaaacggctaattttctggttctgcctgatacagtgctcggggccagatgccccatgtaaagcttgtcggtccacaaacaccgaatgtcacttcgatccaagccgagacctcagacgaaaggttgccgtgaagcggacgatccaggagctcaccaaccacaaatatctcctagagtctttgctaagcacactcgggtcggctgaccaaccccagtttgacaaagtgatggatttgatccggaagaaggcttcgttccaggatatcgcccatgcggtcggaagccccgtcacgacattcggagacacccaagatttgtcgactgccagcagattgccaatcttagagtatggggggcatgccgtagaaacttcaggcaacgcggtgagacgaccatcagaccctggcaatataacaagctcaccagaagagcctccaagcatgaaacctccgcagtgggcaacagttagcccttatgctcgtatcacactagagagcctctgcgacatacctctcttcgaggtgtcggcaaagccgtggacaagtgtcacagatgatgattttctggtctcgcaactagtctcgctctactttacctgggaccacccatgctcgcagttccttgatcaacgtatcttcctcgaaagtatgaaattcgggaatcgaggatcagtcttctgcacgccccttctcgtcaatagtttattgtcaatcgccagcgtatggattccggaaatttaccacgctacgaaacaattcgctaacctcgataggcctattctgatagccctgatgttctttccacccccgagaacgtgttctcgcggggtcagaaatttttccaggaggcacaaagattgtgggaggttgaagacgatgaccacgacctgcctaatatccaggcgctcctcatgatgtgctgtgtgtatgtttccctggtcttagaaaataagtcgtattcatgagattgatttctttgcagatttaaatcccaaggacgaatcaagaaaagctggacgatgcttagtcaagcagctcagctggcacgggatataggactttttgatactccaacagtgtcgggaaatgacatgtcgtcagagatggaacggattcgcacaatcactgcgtggggtgtcttcaacgtgagcttgtaagcgctgcctaccatcgtaagaacgaataatgtccaactaattggcgcagacaaatgtcgattgagctgcagaagattgttcccttagcatatcccacgtgcggggtcaagttgtgtggcgatgaagactttggctggataccgtatcctcgctcaaacaaaatcacatttgacaaaaagccagcccatctccctcaagtgaggaaaggattagctgagatcaccatgatcttagtcgatattcagaagctcatttctgaaaaacgtcggggcaccagctttaatgagctgtggataaatgctaatgacccattcgaccgtttgactgattggctgagacgttggccgagtgtgtctgctatacaacgagatccgatcccacaggtccttctcttgcggtaagaatgactaccttcctgttccgtgtaccccagtgactgttgtatgctgatactgcgtgaagaatcaaatgtctccaggccatcatatacctgtttgaggttttcaatgacccccgtgagccacaatttgcccaacaggtccagttctatcaggctaggtccgccgagcaaacggcgcattgtcttcgcatccatcgccagtcgtatggcctcagacatatacccatccaggtagtcgatgccgtacagacaggccttcggatcttagtccatcaattggaaagaagtgacgaatcgaggcaggcgtttactgagctttgtcggtttggaatggctctgagccacaggtttaagcaaacagccgacgtgatccatgagatcaggaggaatgtgcagcatcgaagtatccgattaccacctgatgttgttgtattgttcgatcacccggaacggtggaggagtctcgagccctgaaagttagcatgacacctgtgcttgtgaatgtatgaatgcatctatttcgctaccccatgaatgatattgaaagaaatttcaccctactgcagattcgtgtgaagcaaagatggaatgtgaagtggatgtatcacgacggcaggaccggaacgaaggtgatggggaaaatctgcaacatcctagaaaactgtcacggcagagtaaacattgagactggcctactcactctttcataatggccagtactctgccttcctcgcaagcagatcggagacaaggacgtgcagtgtcaccgtctgtggtttgaggcaaaacaagggggtcaaacaacaacgttaactgaggggaaggggctgtcattcgcagaggcctgttagccgattacaggcggccagttgctgacctctgatccaccggaagtcttttccctgcacatttcacactcaaattactcaatgaaatcacacgcttgagaaatattgaatttctctagtgctggacttcccaaaattcctctagaaagtacaaaaatgggtacttacttgaactgacttggtaacgtgctaaagccaaccgtcttctgtctgctgagatacagttaggccctgttacgcccatcttttatatttggaattaccctacactttggtcagatggaaataggtagatacatctagatagtttaagtatttacaccgagtacaccaagtcagtcttaaagcaagcattcgaaagagagagcatatacacgatcacttttcaaaggttatagtacagagaaaagtcgcgtttagaactcaagtctctttatggccttttcctgcggtctacgtaaaaatattaagaaagggcggaaggtctttatacaacaaaacatctagaaagactacgatcgaaccaactggatcgtatcgttctcgacagaacgcggccgacttagtcttgtatatcaagatgtggaacagccagaaagagtatcaagtctgttgagaatgtccagagcccctttcaccatcaacttgtacacttcaggacgtttactcctttattctacctattaaatctctacttacctaggcacttggtatctaggttgttgcaaagctatagtgaactatatttgagatggaagtatacagtacatgtattcccagccaaaacaggtgacagtctcagtaccctgtacttatcctggccttagtgcatcaggcacaaaatctacacagctgagtcatcttgatgcttatgcccagataagataagcacaaacacccaagcgaaaaccctcaaaattcgacttctttggcaaatcgcacacgccgacgctattcttcccagccaaaacaggtgacagtctcagtaccctgtacttatcctggccttagtgcatcaggcacaaaatctacacagctgagtcatcttgatgcttatgcccagataagataagcacaaacacccaagcgaaaaccctcaaaattcgacttctttggcaaatcgcccacgccgacgctattccccccccccctccccacctcgccccttccgcttcctcactgccgtttcatctcggcatcttgctgcatttttaactcttttcttctccccctcccactcaacatgtcctacgacgaccgcgccaatgcgcgccccaacttgaacgatgagtccgataatgaggaggaggctatggtcaacgactaccgcgagcaggtcaacttcgacgatggaatgagcgagctggaccagaccatgtcccacggtggagggcaggctcaagaccttcaggcccaactggccgccgccgccactccgttggaataccaggctactcttgagaccaaattcgccagctacgacaactactgcagtctgttccactatatcctgaactccgatggccccgtggatttggaggttcctaatgtaggtattccgttttgccgaccgattgttgaacgccatgaatgaaaagtaaaagcttggcattcgtgaaatcaacaagtcgattcatccctccaaaagacaatacggataactaacaatgcttttctacaatcagtactactgggcttgggaagtcattgatgagttcatttaccaattcgagtccttctgccgttaccgcaaccgcgttgctcgcactggatccaacgaggaggagagccagctgctccgcgagaacccgaacacatggggctgctactcagtgctgaacgtgctttactctctcattcagcgctcgcagatcagcgaacaattgaacgccactaagcgcggagaggacccaatggctgtcgccggcgagtacggctcccgccccttgtacaagatgctcggctacttctcgatcatcggactgctgcgcgtgcactgcctgctcggcgacttcagtcttgccctgaagatcctcgacgatgtcgagatgaacaagaaggccatgttcgcccgcgtgatggccgcccacttcaccacctactactacgtgggcttctcctacatgatgatgcgccgctacggcgacgccatccgcatgttcagccacatcctcgtgtatgtgtcccggacaaagaacttccagaagggcggcaacaactacgaagccatcgccaagaagaacgaccagatgtacgccctgatcgctatctgtgtggctctccaccccacccgtctggatgacaccatccactcggccgtccgcgagaagtacggcgagcagttttaccgtatgcagaagggtggccccgaggccctgcccgtctttgaggagctcttccgctcttcctgccctaagttcatcaaccctactcctcccgacttcgacaaccccgcctccaacgtcgaccccgtcgaccaccacaccgccatcttcatggatgaggtcaagaacaccctgttcaaccccaccatccgctcttacctaaagctctacactaccatggacctcaagaaacttgcaggtttcctcgaggtgtcccccgagcagctccgctcgtggctgctcgttaacaagcagcgcagccgccagatccgctgggtcgatggtggccttctggatggcgagcctgccatcgccaacgatctcgactacgctcttgaggacgacctgatccatgtcagcgagaccaaggctggccgtcgtctggtcgactggtacctgcgtaacctcgctcgtgtctactaagcggggccagtgtctcattagtgtgccgagagttgaaaacaaaaaaaagcgaagagtggtgggagccttctgcttacaagaagaggaacggacatgacttgagatgaattttctttctttttctctgcctactttgttttttattttccatattatactcattgctctcccccttccccctcacgtttcttctgttgttttcctttttttttatttttcgagagtcccccgtccatggatcatggaagttcaaggcttcctggtccgttcaaaatcaacttcgagtttgattatcgcgatttccttggtgggcgtccgctgtttcatgtgtcaccctggtctgctgtcgctgcttctttgaaggcagatggttaacacagcatggagagtatttgtgtcaggtagaagaaaaacagttacttgatgaaagtattagatgaccgagaaatacttacatatttcaaatatttcatggtcactgtgcttaaacgattgctctgtgaatagtattttggatgtggatgagaaaaacaaaacctagaaacttcaaattcaatgaaaatatttcataattactaggcgcaggccgcatgataaacgtcttctatctacatgtacaagtacacccctctctgaactgaattataacaataatagctcgcctgtagcagccccaccagccagttgcggctgatacacctgctgctggttctgggtcacaacgtactgtgactgaggcgcacctccaccaccggtaccatcaaggtccagcgaagccatttgctgggagccgataccactgaagtaagcgtctgctgcatctgctgcttcgttcatgttgctagggcctgtagttgcggcgttgatgccagggccgacagggagagatggaggaggaccattgtacattggcgtgacggggtcgcctgtggtgatgattgtggctagaccactattactggttgatgtggcagccatgtttgcggagggagggttgtattcgagcatattacctgtaccgtcatccacttcggaacgttgcaaggctgggctgggcataagacgccgaggccgggcagcgcggaagacttggtggataggcttaaggtagacggtggctagagtgccgacattcagacacagttcctcgagagtgcgtgggtctagcttttcgctctcggccgtgattgggggcttttgacccatgaccacctgcttggccattgctgggtctgtcgacagcaagcgccagtacatgtaaccgcggtcacgaagatcagggtcgtctgtttcttcggtgcaccatttcagcacttgtggtacgagctgctggcccttggtggggcgttggatgaaaagtttgacggtagcggtgagcagggccagctgcacttcgactgtttcgtcgtggaatgtggccaagtagtcctgaaggaggccatccgagttatctatgcggtccgcatactggccaatgatccaaatgacggcggccttggcctcaggctcatccagatcgtcgatatttcggataacatgactgattatactttcgtactgattggggtatttgcggaagatgttgcgaatcactactgttgcctcttgaacgatgtatgggatcttggcatcgaccaactccaagagcgtttcgatacactgctttgcagcagattcaatcttgatggccagtttgccaatggcccggacggccttgcgcacaaagtgaacgtcaatttcagtggcatatctgcgaagtatatcagtacacgtttgatacggtcaatctgagaagttcctactctcggagctctgccaacacaacggagatgttctcttttgtggtcagcatgaacattaattccagcttggtgactttgacgtagattggatcgttgtaattgcagaaaaacactcggatgtcattccgtaagacctccggtctcttctgaagaattaagatagcattgcgcagagccagatattggacctcaggcggcttggagagcaatgtgacgagtggtggagataacttcttgcataacgaggtgatatgcttctcgcctggaatgtagttcatgagataaagaatgacacggcatgaggttagaacgacagcagaatttgaatgcgatagtcgcggggcgactcgctctgccaacagaagcgcctctgcggaatcctggggcacgtacgccattaatgcctcgaggatgtaagtttgaccccatctatttgaactgttaacacgatgtccctagatatggagccgaagatgcttactcggagcagtctgccaggattgaaaccaatttcgaggcactaacatagtcgatggtgagtgaaatcgattcactgcggccccagatgtccaccaatgaggctaagacgctggaaacaacagtcgggttctcatccttcaacatgcggttgagcctgtcgattagatctgagttctcaaccatctttttatcgtgctcatagagctttgcaacgcagaaagcagccgtcttgcggacgtatgggtcgttgtcttgcattaggcgtttgacaggttggaacgtcgcttcgacaaattcgcgaacatgcacatatgagatggttcgcagtgcaagcgcgcggacaagtgggttgttatctgccatatcctataaagcaagtcagattaatttgaatattctctcgtgacagcggggccatacatcaatcaatatgggtagagccttcaatgcaacctctggtttcattctcgaataattgaccaggaacaagaagcacctagacaatgtattagcaagcgaccttcattccgtatggcaggccataagcatcattacatcttcttgatctctaaactcggcagattcatacaaccaattatatccggaaatagcgcaaccatgtcgttgttgctcatggtcatattggcgacaatcttcttaagtgcgatctttttggcggaatagttcttgtcttttttgccgccgctattgagctcttgccgtagctctgcaaccttcccctgtgtattgcgcacgcgtaagccatggaattgaggatagggagcaatacccatgaacatgagggcagatataatatggttatttggagtgatgtagggtaaagcaaatcgcctatgccaaatgcaagggaatcgagtaagatgcagaaggcctgagtacaaagctcaccaaagcgaggggaagtgaatacatggaagtagactgcggggaagggaggaatggccatgatacgatgtgggagaaatcgtgcaatcaaagaacaggttgggcgagctaacgtaccctagcgaataacttcgcatctcctccagaactcatggctgcggtatgggcgaatagcgattaagcactgcaaggcgcaatttgttggaatgcgaacttcggcaagctctcgtatctgacaaccgtgcgatcaatcacagtcgagattggctgggggatcttcaaggataagaaagtaagacgcgaaatcgagtccaaagggtccgggccgttcggggagcttcgagagaggaaaagggtgagatcgagggcgtgttcacttatggcgcatgcgggatactcggagacaaattaaatcagcgattggacattgtcctttcttaaacaatagatcggaaaagaattaggagaagtgggaaataaagagagagaggaagagggaaaggagaattgaaggcggcgtagccactaagggaacctccctactcgggcaactttcaacctcccccgtcattcgattctcccaagatcatctcccccccacaccacatctactatcttaattatgtcacaagctcgtctaccacctcctcctcctccgcaatgggtagtttcgttgaactccccgatgccgcgcccctcaaaggccgcatccagcatcccagacccgccaggcttctcgagcagtcggggaggcaaacaggtgagttctaccacaaatcatgacaaatggtcgtgaagatactaatgcggttttcagcgccagcaacaacagcaacaatctatcacgaagagacccgacgagaccgacgcgcttaagatgaagaaagcgtgggagattgccatcgcgccatccaagcagatcccaatgaatgccattatgatgtacatgtccggcaacagtcttcagatattcagcattatgatggtcctcatgttgtttaagggtcccattcagggtctgataggtattaatgcggcgttcgccaagtacgaaaccccgtcgacacattcgcgtctgcttggagtgaaggtggtctacattttgatgcagttggcattactgtgcttgggtatctggaaggttaatgcgatgggactattgccgtaagtcttgctctccagatttgacgcttatttgctaacatgtgtccagtactacgagatcggattggttagcgtgggagtcggaacggcagcctttggagcgggctcattttgctttcaggtgatgcgataagcttggagtacggattaagtgttgaaagaggttaatggaaatgcatccatggaagataatgcgatttggaacaacagctcatcatgacagtgatcatgttggtctaatgccttgtattattgattaaaaagttccataatcatgcatttcttgggcgcaagtttctaaaggggtatcggtatgaaagatgtagtttcctgatggtcatcgggtcgcggaataacccttggtcacttctgacttcttgaggcattcccatccacggttttcttggctgcctctttcagacgacgctcttcacgccaatccggccctttctgaatcacgattaatagcagcggtgtcgtggccatcatcaccaacgcgatgaatgtgaaacaccagccccggcccatggcagagagcataggatcgatgagtgccgtcgcgccagctcccagtaagcaacgcccgaaattattggctgcagtggccttggctgcttgtgttggatataggtctaccaggagtgtactgatggtattgaaagcccctgtcaatgtcaatcccatgaggaatagaatacacgttggcgcagcgagatgaattccaaagttcaaaaaccacccaaacacaaggacggatatgcttcctaacgtgagaagagggaatgcgagctgaagacgagctttttcaataggaaagtttcgcaagtcagtttcgcggttcttggttagcgggaagttcaattgctttgcaagacggcggtagttgaaatccaagaatttgccattgataacagaagcaatggtcgcaccaaggccaaacggaatatagcagagaccaatttggaggtcgtctagcccatagagctcattgaagatagcaggaatgcttgcgctcacgtcgtagaatccagcaaaaagaatagcattgcagaagaggatgagactggtatccttctggaatacaatggcaagcgtctggaagggattgggaaacttgagtttctgtttggatacaattgcggtagatatgacgccttcacgagcctttcgggagtccaggtagctgatcagggacatattccatttctgaggaggcaacgagccatcaccgacaataccacgagcagtttccgggaagaaaatcagaaatggaaccatgaaagccgctgcaaaaatggtcagaaaccagaagatcgcccgccagcccaaatattgagacaaaagacctccaattactggaccgacagagggacccatgagagatcctgcggtgacgaatcccatgtaggaaccccgttgtgatgcagtggctacatcggcgaccacccccgacgagagcgcgatggtggtgctgctccctgcactttgcaagcaccggagaacaaaaagagctgcataattgttttgtagggcaagtccaatatttgctgcgatatagatggtgaagcacacgatatatgctggtcgtcggccagctttatccgcaaagtcaccaatgaacatgggcgacagcccttggaagatctgcattcacgttagtcaagccaaaaaggagatggtcctgtacacataagaaggcgtaccatataactcgtcaaagtcaaattgatcaacgaatttgatacatgcaggtctttcgccaaggtattcaacgcgggaaagtagatctgagaagagacaggggagaagaacccagcccaagaggccataaagacaatatacctgcgctgactgactgtgaagaccgagtagtcgacatcagcaagatccccgcttctcgttcccgcatcttcaccagattccggttgcgaaacagatggttgttttatttccttctccatctagggcgtcaatttcaagaccaaatacgtgagtaagagggccttggggacgcagagaaacctgcaacccccgttttttctcgctagctcgtaagcggaaaggatgcatatcgccatttgcggagataacggcccaaaaagacgtgccgagaagccgaagatgctaaatatacggttgatcactactctttacaaactacagcatctgcctagatataattatctagtccagactgtgaggaagggttcaaaataacggtctgatgaacttgatttccccatagttgaatctaaatatatgcagtcaaaacaatacgatagtacagaacagaacaacagtcaacgcgctttgacggcttctttgcatgcctgcaagaagatctgactgaactgccacacttccgtgtaagtgttatacaagggtgcaggagcgacacgaacaacgtccggttttctttcgtcaataacaaccccgttctcctccaaacaatgcagaacatgatctaacaatccgggctggagacgtagactaagctgagcacctcgctcggctggatttgatggtgtgatgagggtgaatggtttatcttccgaggccgcatctataggatacctcatcagaagatgttctagatatcccgtgaggttgatggatttctgtcgaatttccttcattgttgcccgtttgaagatttcgagagatgcgatgaccgcgttgatgtctaaaacagagggattcgacagctggaatccagcggcaccaggctgtggcagaaattctgtagtcgttagtctcgctcatttataatcagaatcagatcacgcactgttctccatgttgaaacgcgttttaatatctccaccccaccagcccgagagtcgaggccggaatgtctcgtcgctttcgggctgtttctcatctacagaaccgtggcgttcatggacaaatagtcctgctataccacccggtccgctgttgagatacttgtaattgcaccaggccgcaaaatccacgttccaatcgtgaagttgcaaatccacattgccggcggcatgagcacagtcccagccgatcaagatgcctttagagtgggcgtgagccgtgatccgttcaatatcgaagtactgccctgtatagaactgaatagccgagaggaggacgagtgcggtgctggaagcgttatcatcgatcactttcatgatttgttccgtggtcaaggtaggctgatctagatccttgggttcgatcaaaaccatgccgtccttcggatcgaagttatgatggcggagctgagattcaaccgcatactgaattgcactcaggttagcaccaacaacaaaatcgacaattaaaatgaaaaatcgagaacatacatggtcactgggaaaagccttgccctccagtataattttatatttctctttggtcgggcgatagaagcttgccattagcaggtgcaaattggcagtcaaggtgcccataactgccacttcactttggaaggcaccgacaactgaggccataagcttggatgctgcagtgtcaacatcgacaaacggaggtaacaattgatcatcatgcggcacaaagtgcccggtcacgcctttcgttgcccaagttcgcaagtactgctcgatatatttctgggtgctacgaggttgaactcccagtgagttaccacaaaagtagatgcatttttcatcagacgcttcattgcctaatgagaagatgataaagtcaaatgttagaacggacgccgcctgggtacacaagagatcctgatacgcactttcatctactgccagggtcttccgcttgagatcattcttggacggaatgataaactcatctcggaagctccgaagcggatcttgagcatcaagagcttcggcatactccttcttgtaggctctgatatcatctgcatagggaagcggggagccggttttgatgtcccgaacatgctgctgggaacccattatgacagacctaggtccagatagttcctagaatgcgtgtgtatgtttcacaaagccaagagctcgagtcgatcggagcttcagcagagtcatacagtcttcccccaccaccatctgccgatcccttccatatatggagattattctgccttgatttaccgactctatcagaccaatggcgtcactgctaaactgactaacccgatgtaatcggaatggggatgatttgatatcaagtgttcttcatctctctggtttatcttcttggaatatcttattccttcatacatcagccatgtcacgccctttattctcatcgacagccgtccggcggttatcccaagcacagacgtgtcggctcttctcgacttcccgaccggctttgcgcctctccgcattccccggcggcgaagtcgttcctcgccggccaagaactgtcgcaagtagcgcgtctcctctcaaacgctcagccgctcaaccctcgaactcccgctatatccgtcagccacatgcgtgtttttcctcgtcgtccatccgtccggcgaccaaggtgacgcagaacccgagaaccggagatgatggacaatcgctcatgattggcatttcgccacgggccatggaggtgagttgacaatggatttaatttcttttctttctgtttgtctacttttgcttcgatcttctacctggcctgtgttgggacggacatgggaagctctccaaactgcatggaatcaagtgctggggctctgtctcgatgttggcttgctttcagccgacatgggaagaccctatgaccgcgccttgggtccttcagatgctctttcaagcacatgcgaccatagggtgtggaaaacagggcttcccgtccgctcagccgtacttaagccacacgccggtgagttagtagttgggtgggtgaccaccagcgaatcctcactgttgcatgttcttttttttttttttttgttcttagcttctccttcttttggggggttttctatttattttctatttttgtgaatcaccgagctaacccagcgcagcgtctccgcgagatcacagacccaaccacctccccctctgctattaaggaagagaatccataccaccatcttcgcatcacagttaccagtggtggatgccatggtttccaatatatgatgtccctagagggggcttccaaaattgacccggaagaggatactgtgtttgaagcagaagcagacgaagccacaacacagtcacctggcgaggccaagatcgttatggatgagccctcactcgagctgttgcacggcagcaccgtggactatactaccgaattgattgggagccagttcaagattgtggacaacccccgtgcaacaagtaactgcggttgcgggacaagtttcgatgtcagtgattgattgagcaatttgtcccttggagggataggagagatagtaactatttactatattttgccctttcttctcttgttttatgtacattatactgcattttgcattttgtatactggaaagatagataatcacattctataccccccttctcttgaatcggtcaagatattaacatcgatttacggtaaggagtcacgcaatgccttttagcaggtcaacaaaagccttcatagtattttgtacgggagagaaagcgaggttatccacacggagggagaagttgcgtggatatggatccagtttagtcaatgtataatagctggcttgcttgcctagcttgagtcggggacatggattccggcacttgaatggaaatgacaagaataagaaagagaatatacagcattctttatgaatcttctggcattgctttgcgcttattacctcatgaatcaggcgagaaaacagaacatcccaaacctcatctacttgcactaagcccattttgatttccctcattctgctcattgtagtgggaggcactgtatatcaggtaggcgtatgcaaatgcaatcatctcacaatgagagatatcattaatattatatcaaaaatcaccaaagaaaatccttctgacccttcaatgccttcgctaagacttccggataccattgccgcccggtaaacccaattctagcgtcctaggggatcttgtgttccagggacaatcttagtgctcctggagatggcattggtattcctggacatctggagacggctcggtgcccccttggactagccctggcatacaattcgtgaatacatccgagcgaagatctaaagtccctcggagattaccttttcgggaaagtacggaaccttccagattcggaaccacagccttgttctatcatacacagcgatcattgactcgggataaagaaggaaggagctcgactccatattagatatagaggcataatttaatacttgcacaatgcatatgtggctggtatatatatctcacgaccgttccaaggttcccattcgattattctagccagtttgtcggacaggagttaagcgcgacatctcctaggggcacttcaattcatcaccattacccgctatggagcgctcggaaattacaccgagcgaatagcagaggtcggggtcttcagacacgtctttcgatgaaacaagctcgcccttaccatcgtctgcgagctccttctcagatattacctacggcgcagacttgaaaccatcggaagtgttgaagtcacaggtcgtattcgtgcccggtctgttttcctctatcatggcagttgagccagtggtaaacccaaactaccacaaagtaaatccagaagcagatgcttggattgcagagtatgcttagccatgctccccgatggaatgatatcaaaactgacacgagactaagaataatccaggccgataaaaaatgggcttccaggaacaccagggtagatctggcctacctagcctccatttgggcaccaacttgtgatcaagaggcacttaggatgatgattgactggaaccattgggtaggtctgaccgtatcttatatacagtatcagagcaaaatgttaactggtgacgaataggtctttctttttgatgatcgtatggtagttcctttactattcaaataccaacgtgctgaccctgtttatcaatacagagttcgatgaaggtcatctcagtcgagatccagaagcagcccaagaagagatcaaccgaactctggaaatcatggaggacacacagccccccgtgcgatgggatgataaccctattcgatttatcttctagaccacatgggatcgtttgaagcaggtaagggaataatttaccctttttcgggtacagaatcaatcaaacgctgacctcaagaccaaagcggtgtggcagaggtatgcttggtctaaagtcatggaattggggctgttgagcagagcggctcaaaagtcagatctttttactaacattagggcagaccagcaacaacgatggaaatatatgcatcgacatttttttgatggattgttgaagcaggtcaaagtaatgcatagtcatcaggctcttgggcgcgatgtccaagagtacatggatatgcgcagagggacgatcggcgcatactcagctattgcccttactgagtgagtccctctccataccacttcatcctcccagcagactactagtgggcattgtattgactaggtccaggtacgccattggaatcaatcttccaccggaggttatgtatgggcaattcttctcttgaggagtgtatgtgcatctcagcggatctggttctcctgtaggtgcaagatagctcgaatggaacaccagattcagatggctaatattttaccgagtcaatgttattctatcatacaaaaaaaatctggtaggttggccaagcagcacatgtccaagactgtcgaagctgaaccattcttcaggcattgggagttgatcataatttgatctttcttctcagagctcagggtctttcgatgcaagaagcagtagatagaataggtgagatgttgaacaagtgctactgccggtggtacagtgcattgcagaagatggaaatatggggagagcacatcgacaaacaggtactcgctttcattgatgcctgtcggaatgtggccttgggtaacctgcactggaggtgagcggagacaaattcctcccaaatctggaaaatccagagcgaaattgctgacagggtcacgaatagtttcaaaacaggtcgctacctcggtgccgaaggagaccaagtgcatgaaaccagaatgcttcacttgcctaattaagtaccacgcagggaggctaccgaatcatgcctagatttaggaagccagagatgctcatatgatacggatgccccaaggactttttgggtacgctcgacaaattagaattctttattgctcctttgaatccattgaaatagaagctcaaaagatcagcctacccgacctggatatccaagttttctcttcagcggcgttcatcggaaccttaggcatagatcgcatacatacgcccctctggatttagtttgaactccccaacacagctttgaaaaggagtgatcttgactttgctagatactgggggtgactaccggagttactacttatgattatcgcagagccgaatagctccgtagatgggactccgaaaggtagaggccgaaaggtagaggccgaaagattttcaaattgaatactcggctcaagaatatctgggaattcgatctcactcgactcctacccaggatttactaagcttccacaattcttcttcctttgcctggtcaaatgcccaactgctatatccatattcgagcgcatctccacccggtggtgtcggatgaattgccaccgatgcgccttccaaatacaagccgcctctgccttccagctcactcgaaacagcaccgtatatgctggttgcgcaggcctgtccgagactggataagtatgccattgcgcgcttgtcttccaagacagacttcatttcctcctgagaatatttctggaggttggggctcataaaagccccagggtggacgctgaagccgtgaaggccttgggcgccatacaagcgctcgatttgggtggtcatgtagatattggcggtcttactagatccgtaagcaagccagcccttgtagtttccttcccagttaacgttgtccagaggaatggggctgtagcgatgggctgccgaggaaacgctgaccacacgagaggcgaattcaggcgaggaacgtgcggtttgcaaaagggtgtctttcagcagatagaagaggaggaagtgcgacaagtgattggttccaaactgaagctcaaagccatctttagtgcggctttcgggggtattcatcacctttgttcaattagcgaggtcgcgcttttgtgtcggtattaatgaactcacagccgcattgttaatgatgacgttgagcttggagctctggttgagaaattcctcggcacaggcccgaacactggagaggtctgtctgatccatgaaaagaagcttcacacgcccggtatcgagcaatgagcccaaagcctcctttgccttttcgatgtttcgggctgtgccaaagatagtcgctccagtagatgccaagacacgtacagtctcaacaccgatcccagatgaaacgccggtgatcaggacaaccttgtctgcccactggccaagaagaccttcatcctcgataatttgacttccggttacacgcgagtcgcttgggccgtcgagaacctcccaccgattgtgctcggcataccgaccggagagttgaaaagggacttgggaaaccatcgacatgttagacgtgatgacaatcgtgaaacgtacggtcggagcataaataatccgaggctggtttactaacgaaaccgagatagcaagcaagacttcaccatcgtgtgcggcgaccgactgcttatttcaaacaaagcatggcggggttcaggcgatgtccaaccggattgaaatcggcataagttgtcgggccttgctaattagggaatagaccatctactggggggtacattggaggtggatacgccgtaggatcgtggttgctattactactgcacgctagcactggcgaagcaaacatctattcccgcgtatatctaatgttcggaattgcaccacaatgccttgggctacgatatccatagtaattgtaagtttctcgcaacttcccactccatctattgataccaattttatattgcttctcaatatggcgccaggcagccaatggcccccgctgtcaggggcttgagacaattctgcacctaacactaacaagcgcatactcgactccaagtatgatgtatgccagttactgaaccatatcagtaactctctcaaagtcctcaggccggtgttggaatacctgaaatctgttcagggactcatccccgatctcatcaagaacccggtgggctaggatagcagcaatcaacaattcggcctgatcaaccagcgagctccatgacctgcaatttcactcaggagccgtgcgtgaaacgattcgtcgcctatacactcccccggcacctgctgtaagcaatacagaaattcagacgattggataccattgattgtttacacatacggttactccgacataagtcatattttataagcacattatccactctattccgcttttgctcttatcttagctctgtggtgcacagattcggacccgctaggtgtagatttcatggtgcagggatcaattttgtgaatcacgtctttgagatcagaccaaaaggcctgagaacgtcgactctttccttttcgagacaatttggacaggtatgacaaaaacaaccttgtctagcgtcgtggtccggcgtcgggttaggctttgagcggcaggcggtagaattaagcataatggagtccgctgatctggtgcgatcgagacttcaaattgaatttgaaagcctcttccggtgggccgaaagtgatcctgcgctttgtgttgtctcaatgatgccacgccgtctcgtgtagactgcatagtgattaattaatggcaaccaatgcgagctctttggtgagacatgagaatttcatgagaatttatcttttctgttcccttgtgagccacagtcggggcgccgccgaaccttgggtggattggagacaacggtctgtgtatggcacacattttacccccaccagacgggatcgtccaggattgccgtacggctgaactatgactttcaaggctaatcattgtcatgtgggtcaggactcgagaagttatttgatccggtaagccggtccgtatactccgaaacacccctcagtaagtgcagtatgggcttgctagatcctgtaaagcatttatcttctaggctattagatggctgatatctaccatcctaagcaaccttatgaagttcttatgcttctgtcgagatagcaccttagtgagtctatcggtaaccatactcgcttagcaacccattttaccttaatgcgtccctctctaacctcttatagtagcgataaatatccatatatcgaagcttcgttttatatgctataccctcactttttaataggtttatagtcctctcgtcattatatataactaatagtaaaggtatatgaggggataaagctatggtattaagtgttacgatctggcggctaggagccgtcagtgtgacgatctgggaagggtcgtacttaccagacaggcaggaacgaccacgccctcgccctcgcaccttcccagaacaaacgagattaagcgagacaattgcgagttttgcatcgaatacaaactcaaaagctagtagaagatggttgctacttttctattctataacctttatattcaaaagccgtatggtagtagctagtagctaaggtctctatgaagctctatagtttagagctaatgatatttctacttaagggggacctatccgaagggaaagtctttcaaagactttatgctcttcctggtagttttcgatgtggcaaccataggtgaggatacgtggcggatgacgaccgcgtgcttctccctagaacaggatctcattccaggaagggatataacgagcaatcaggcgctctaggtgagcatataaatttcggtggctgtgcgggtgtagattattgacataagaggtgatgcgaacatcgggtgtgtgatgaggcgaggaagtaaattctacctcacgtggcagccactgaaatcgattggaccaacaactcttctgttcatccctgtgacgcctatcatggcgccggggcctattatggcgcctacgcgtttgttcaaggggatggaccggcagctctttcgcagtctgtccggtcaaatgccaggggtcatcaagagatacctgtccgccttcgaccaacaccggggaccggtcatagacaagggggaactcggatggatctaccagaggagagtcgtgactggcttgcgttcctaatcgggctacctctgtctggatatccttttgcggcagtggcacattagcctggcatacagcagaagagctgtcaaatactagcaaacggccggtttcttgccaggtctgcgccttgtcccgtagctctgcgatgcaccaatcccaggctggtgcactgataagagactcttcacttgctactgcctcttggtgccattgcgcgagccgaggttcatccggatccagcagcgcttggtcccacccgggctgttccgttatatgttgcataagtcggatcatggtcatctcgcgctttgtcaaccggggcgaatggcgatattcaattagcgcatgggcaaagcgggtcgcggtggggagctcatagtccaagggaatggagccaaatccagggacctggagtggaccatcggtgttgttgagacttgacattattgagctttctgttctgttgaaggcagggctctcataactatataaagagagaagaaggcaagagaggcaaacaagtctagccctgacatttcctaatcggattttatcgccgtgcggggtgacatatgagtggactagacgacctcgggaataatatacagatactaatcgcgatagagatattacacagtaaatcagaaagccacatttcaaatctaagctacccaatcgctctgtagctttcaaggctcctcaatgaatcggactgcgtgcggatactctgtatggtcatcatatggttccggattcttgttgggcaaaatccgcaaatgattcctactgatcctgctctgttgctccatacttcaaagtagtttgcaccgctggttgttgccagtcgatgtcttggaatgagaccaactcatcctccaacacaacagttcgctccgcaatcaccgcaccgacgtaatatgcacgaagtgaatttttcttgtcttgagattgtcctgcctgcgctctgcgtgaccatacactagcgctgtcttggcttggagcaagaagatcccccgctggaatagttaggcggttgtcgcgcgttgatcaggatgttggtcgcccaggagcaaactgtgccgttgctcgtcatctgagaccaaattttcgtagattatatttattatacccccgtccagtcgttgcatcggccagctcttgtaaatcttcaggcccagtggtcgatcctagctcgttgtccttgagtaggaatcggaatcataatcggtctcgatgctataaatgaactccaagaaagtgcagacaggaccagacttcaggatgcactcagtgcatagtgtgtgaagatctccattgatagagacgttgatagagacgttggccaagtaaccctaataaaagtaaatcacttcgtagttatacgtgagctaggagcctaccacaacaatgcgggaaaggatcggaaaggatccaatgaaacgtaagcgaggctcttattttggcagagttgagagagatatatgtatgttttcgagaatcaatgacgatctacaatgagcaagacgtaaagagtaataaaagtgtggattcagtattggatactggacttcatggcctaatatataacaagtgtaaggagggataatatcggccgcaatcacagccaaattatcccgtatcgaaaaacagaagtctcgcttctaaggttcaatggtctttgttagtacgttacagcaaggcttggttagtacttcggcgacaatctgatataaaccgttgatattggtggtgatactagattgttaactagatattagttttgtcattttccctttatctagatataggattcaaagattacctgccctcctatgggtgactagccaaatgcctaccgacgattgcctcctataagcctgagtacgatcggtatttcagaggccaattttcaaaccgcaagccgtgattgtcgaccaagccacactatccactgcccgtaagctgacggtcttcaagcgaaagaagcatgtggaggaaatcgttctaacaacgacaaagaaattttgcgaaagtgcgaattaaagcgccaacgcaccgacggacacattgagcctcgatcatggggacaatctaatgaagcagagtccaaaagagaaatacagtcggaagaagcgaggatataaagccctactggaatcctaaaaaagatcaactctcctcagtgtgccgatcccgtcactcgaaacgagatgcagtataccgccgtggttcgtgtcggtaagtgacgagctccatagctccctagatatctagaaggatatgaatggcgagatatacttgcaggacactaagaaggctgaaatattggatatcgatgacttgtgtatcaaaacttctggtaacgctaaaatgagaacaacaaatgcctaatcccacgcagagatgaagaccgtcttcattaatccttctccatcttcgaaagtccaccacggctacgccgaatgcgttcatcgagagtatcctcctgcacccgtttattgacatcagacatgaacctgccccggtctgaacgctgccgatcatcagcctcccgctgctcttcttccttggcagagatctccgcgagtcgccggcgtcgctctgattcgatttctgtggcattgtattgcatctctgccaatttacgacggcgctcttcttcaagttccttgggatcgggcttgttcgttggggtacgggtcgagggtggccccatggcgcccctggcagagtcgcgccgattgttgtattcgcgtcgggggaagtcacgactccgatcttcgtcggcggcggggcgttctttgcgatcgctagaaggccgaggagatcgagagttccgggatggtgagcggtctcgtccacctctgtcttcgcgatcttggtgtcggctggagtgggagtctctcttgtcatggtagtcgcgacggtctcggccccggtctctatcgtcccggcgagaacggttctcgtcgctcctgcgatcacggttgtctgggcggtattcgtcgtcgcggcgttcacggtcacggtcacttcggtgtctgcgcgaagaccgatctggcgaagcgggtgatctagatcggtgtcgtcgaggtgaagaccgtcggtggtggcgctcacggcgctcgtcaccggcatcatcactatagcgcctgcgctttgagtcgtgggtacgatggcgacgatcacgatcctttccccgatcgcgatctccgcgttccttctctctttccttgcgcctgagagtctctttcaccatcgcctcataggccgcttgttctctcttcttcacttcgagtagcgggtccgccataaccttcgacatggtgtcgcgcgccgagacaatagatggaccggccgcggaaccattacccaccacctccgaacccttctccagcttcttagtgtccggatctttcttcaggaggactccatcgatgcggcgctttcccagcagatatccctccatctcctccgagtagtgcccggtctcgcccgagggtgcttggtacatccagtcgactcgactgtgttgctttgcttttccggaggcttcttggaggcgttgaatctcctccatctggcgctcctcctctctttcacgctgtagttgcgcaatctttttgcgctcgtcgagagcgcgcttctcttccagccatacacgctcctggttcttgatcaagcctggatgccatgacctggttggacggttagcgttatgcttctctcttgaagtaggtattgaagccggaacaaggtacttacttcttaaggttcaagtctccacccatgatgcctggaaataggaggaatagaatgtaaaggagcttggtatgagcaagttgttgtccgagggtccacgggtaaatctaaagccttaatcgccaccaatcacgtgatctagaaatacgatacactctgatatggagtgtgttaactatgtgatacattgaatgtgtcgaataaaacgggaataataaaatgaatatcttctattttcctctttcatagtcgggatatcagtatggcctcaaataactaccaatggggcagaattaaccataaagcagaaacattagagatgtagtagaagaagttgagaataaaaacgcgaaaatagcaaatgacgggggttggttctaaatacaagatgaagaaccgaaagaaaacgcatcatatcatatcgtcatcgccatcgccatagaactccaagagcaaagccggattaccagaaactacaccatccaatccaatgttgacagatattctcaacattggttgcctgcgcaatgagcttgtccacctggtcgctgacactcagctcttcgctatttcggaagtctcgtccagtgagcttctccttgactcgggcgagaacctggagagcacgggcattctgtgcctcgcgggcttcttgtggaacgccttccggagcatcgagaataccaccttcaagtatggatgggcggcggcgacgggagaattcgcccggcggctgcgcaccgggttcgaaattgacaccgtccatgatagactggcgacgatccgcggtgagagaaactcggtctggggatgagtcttgtgcacccagacgccagttaattagagggtcgtggatgaactagaagagttaaagttagtgtggttcgagaacatccagaaatcaggtacttacagcctccaaaaccgccatcaaggaatctttatgctctcgtagaacacgcatgacagcctcacaagtgatgcggtagctaccctcaatgttgctgacttccatggcgaatgtcaacatgcgagtaagtcggaacggaactcgctccgggtacttctctcggtgcatcgcgatctcgaaacaatcaccgaagtcgatatgaaccacacggccattaccacgatccagcaacaagttcgatggatgtctgtctcccagaccgaggatgtagcccaccatagacataacaccaagcgatcgagtgtaattcgtacggcgctcgagccatgcctcggagctcttgctcttgagccatagcacacggtacagatctttgccggtcgtattgtccatagcgtaaccgaagacttcaaccttctgcataagggtaaggctatcgtagtcgggtgccatttgtagcatgatccggtgctcaatattgagcagaatccgacggctttcacggtattccttgatcaaggcatggaatgtatcgctgttggatacccatcccagaagaccagagctctgagacaatggaatagcagggaagcgctgaaccgacaggtgtcgcttgaaactctcgctatcgttgtccagcaaggtattgcacaaaccgaaaagttgcatgactcgctcatcttgtcggatatcttcatgacccttgacaaggtacatgtaagagctaccgttgctgcccttgagcgtcatacgacgcggtcgtttctttgtctgcaagacatgcaagatggggtcaaagctcataattcgaataactggcttaccactctggtatgttcctggaacggcaagatcaaggtctgagcaatccttgagtcgaggagacacgtatttcagatccagagttgatagctgcggcagttgtcggctgatcttgcggaatacggtgtaatacaggtcccaagcttggttgagatcgccgatttcatctgattcgcgaaacatcatgcagtagtgcttggcttcagccaaatcacgaccgaaagcttgcgcaaatgacacctcacgaagggtctcagcgcccttgtctagcatatcatggaagggagcaagtgttgcgaacatgccgtcaacatcgttatcaccgaaatagagacgggaggcttcttccagaccttcatgccaaagctcatgccacagcaccgcaacccggataagctcatgactgacaaggtctgcttgctcgaccagcttggcgctatgttggcgcatactttccatgatgttgctagcagattgagagcgtcgggtcacgttcgatttcattgctaccgtcagtggatacacaagggcttgaggatgcgctttgccaacctcggcaagcaacctgtgaactgcaccgcggactctgatattgggctgattgattcgagcgataagttgaggagtgacagcaagccaagtgtcaatattgacagccgtaaatccttccgtaacgacggtattcacctcatgatctccgccatgattaaaccacagagtgagtaaccttaaagtgtcttgcaacgaagacgtcaaggacaaagcgatggagcgaatgaatccgcggattgcaggaatcacatgttctgtaacgatatgagcaggaacagccccaggcataccctcacggctagcctggtttgaaatcgttgtaacaacttcgaagtttgcaagtgcccaggagtgccacgccttgtatgaatcgcggttgtattgggtcgccgctgagtaggcattgagaacctctcgaacgtgttctggcctccagtcacccctctgtagggtggtctgccactctccctgcctcagataactcttggagagaagttttctaaatttgttggcatcaccaatccgttcgttcaggctgatggcgtctggatggttctgatcgacgaccccgttggctccattcgcagcatttgataccatgagtgtgttgtatcgagaaaaatcatcggtcaggccagaggtaaattctttcatcatttcaagagattctagttggtgaccgtttgcccaactgaatttcagcctggcgtatgtgacttcgggtggtgcgatagtgcgcgttccattggcatcagacaccactgtctctagagatgcaagggaccgttccgcaagacccatgcggttggacttgcgacaaagattggcgaacttgatggacatatcaagattctcacgtggagcagtgacaagagctctgaccttgagcatacgctgccacacttccacgttttgctgacatccgagcaatctttgattccaagttttacgcatggcatcttgcttttcggggtcgccgacgttttgcttgtatgtgatgatctcttccagctcagcgagcatctggacccggacaacaacgttgtacgcacggttgtatgactctccgagaagagctgacaattcagtatcgagaccattccgagccttctcaatgtacatgttggcttcttcgaattgattgcgatggattgccagaatggcaccgaagaatgagcggtccggggactgctctttcatgacaccaaggtaagagtccatcaactcccactggcctcgaccccaagcagcggcagcagcgagaggtgcaatagctcgtcgatgctccagtgatgcttggttccacttttcttgggcgagatccgagagaactttccactcgccaagagcgtgcaaacaccgcattttacccattgtgataccaaatgagtccgggtccgtcttctcgcgtcgcttgtaagcagcaagggcttcgtcccaccgttgaagcttctcgaaccatgtttccttgagctccacatcacgatacgcctgcgctttgcgaaggataccaatggcagcgtcagactgctgaagctggttgttaatggtaattaaggcttcaaccgcacccgagttctgatcttgctcgaactcgagttctttgtagtgaagagctttagcaaaagcatgacactttgcagcatacttcccaagagtgcggatgtcgatgggaagagccttgtcatcgtgctccatgaattcggccaaattgaggagaatttgcaaaatctccggggagatgttgggagaggtaagcgccttttcgattgagcggacgagctcttcttggtattgatcatacaactcagtccaacacgaaacgaaggcagcattgaaaaggtcccttgaaagcggctggtagattccggccaagctagcacatgcacgcaatgccggggacggggattccttcaacagctcaatgctgaaacggcgtatccattcctgccaatcatcacgagtggacttctgcgaagcatcccacgcattcttgagatgttgctgattcacaacaatctttttttgtccaatctcggaaaaattggtatcgtccgtggggaaagtatagacctcttctggattgagatcctgcggaagtgggtcgcccttctggagtttcgtcaccaggatctggtagttcacatgcacgatctgattggttttgaggaccttgttgagaagatgaatgtaatgggtgaagtcctgtcccagctggaaaatgagagcacaaatgcagtccatcgcggcttgacgcagcacacgatcaccgctagccacgacccgtgatagagaatgaaccattagggatgcaaagtcagagacattgacttgccgcgataattttgtcaagctatcaatagccgatttgcggatgctctggggattttgtggccgatcgaacaaacggacaatggaaggaatgatgagatgcatgtattcctctccacttgtgccgaatatcaaaagagcatggagaatcttctcggagggctgtcgacgaggcgaggtgtctttatcaagcgtatcgagcatcaaagggatcaggccagcaagatacttcctgaattctccttccagcgacctagcaattgcctcgaccaaggaaataatcgtaccctggatttgatatgaagcatcccagaagtctctaataacctcgattatctctggcaagaaagtacgaatatgctgtcgcacgatattcaccaggattgccatctgattgaaatagggctcaagacggctagcaggagcgcttcttatgaccaagatgaaccctggaataatttgtccaaggaatgggacacacttcagacccagagtcttgaaaattgtgacgatggcatcaatgacagctgagtgatattgcgccagggagttttcccgcaaaatgttctgcatcaaagtatggattaccactgtgggataatactcctcattggagggcgtgaggccctgcataatgagggcaacatcagaaacattttgtatttcgttgatatgatgtacgtcaggttcaatctcgctgatctgttggtacttgtaggggtcgagggcaccgaggactccgagaagcttgatggtctccttgcgtagagagcctgtctgttccgttttgatgatgttgatgagcactccgagaagatgggggtattccatgtatggctcgataacatagcctgaattactggccagctgtcctaatgtccgaagcgcagcttcacgtttgttatgcgacgaaaggtcctggagtgagtccagaataattggcataatctgcggcaaatattgtctcatctcatggccgccgacattggcgagctcaccgactgccttcaaagtagtggcagcaacaccgggattaatgtctgttgttttgggcaacaatgcggtcaccatgggatcaacatatgacctgatcaatttcgtcgcattcgagacaaacaagctgatgagttgagccgtttcctccttctgccgggcagtatttgcgaagccaaggccagtgagaagattgaccagcagttttcggagtggcgggaagacataagcagggttaacgctggaaagtcgaccgataatgcagattgcggcttctttgacatcgaaaacctcatcattgactgctaagaacaaacatcgaatattctctggtcgtgccaagtgccgatcaaatttgcggtctaatgaccacaagacagtgcgccggatttcaggatcagggtctccgatacccacagtcaacagcttatcaataacctcgctgacaacttgaatagagtgtccactggtttgattgatgatcggatcgtgaacgaacagctgacagcatgtaagagcggatgcctttcgaatctcgggattatcattttccacgtagttgatagcgacatcacgcacgaactcgtttaatatgtgcccagagaaatcaaagctgcccagtgtgtgaagtgccaatgcgatatcagaatcggagtgaagctcattgggtgcaaagtcttttgcgaatgatggcataggaggcagtcggttttcaggacacccgaggggccggaatggcgttccacaaaggatgatactcaacatatcaagaagcttttcctggatcataggtttgatgggaggaatgtaatgggccatgtcgaccagagcctgtgttaatgatttgctcagtccacaggcgaaaatgggatccaggagagcttccatgtatttgctgagcgcctgtcccactgcgagggacagcatgctgatgcactcaaacatcggcgcctcgttaactcctgaccgattcctcgccttcattgcaagcccctctcggatgtagatgatgatgccgtcgagatattggccgatagcggtgcccactgcattggcaatctttccaatggcgatgaaggcggagttcctctctttgtctctcttgagttgcgcttggaggtagaccatgaatttgtgtagatagatctcagtgaaatcggtgggtgcatatgaggcaagaatgggaatagtgaggacgacttcggtgcgaatcttcgggtcgcgatggtccttgagacgaaggatgatttcgcaagcatcccgataatgttctttcatgaacatcgtgcccttcaagatcaactctttgatgatcaaaatggagccatggatccagtcgacgttatgggacttcaagcccagaagtgcttcgtcgtgtatccgtgcaaaccatgattgacggacttgagaatcgcgagccacgattatctcaaagcattccccgacggcctcggcggcggtctcgcggatgagtacttttgggtctcgaagggcgacccaaacaagctcaaaaacctgcggaacgaagccgtagaggagtgttggtgagcccttggccagttccctgattacaagaactgcagcaaaccgccgactttcctggcgctccgattgtagccattctaatgcggattgtatttcgctttcgaccagttctgcggttagagccccgcctggcttcgcgagtcggcccagcgatcgggccgcgtacaccaggaccgcgttatcattgctgcgaagggcgctgcgcaagtaactggcaaatctggtcgttttctgagccgcatcaactccgtcaaagtcaatgagccgatcgagtgctaacaagccaccgattctttcgtttgcgtcgctgccgttgaccacgagttgagcgatacgttggctaacagcgttgtaaaattccacgaacttctccgatggccagtctgcacaaggaaatatgttagctagtaagatgtcttggaattcaaccgttaatacctctagacacggagaggacgttctcgtagagctcgtatgcagctctggccctggcctcctcattctttgacttgagctccacgaacaacctttgggtcacgtctgagattgcgcctgcttgggccatatttgcaaatcacaccccagggtggacattggaatacaaggtctaggccataaaataagaagacgcggagcgcataaagttggatggtagagggagggtcatgtgtgaggcttggagaaggtcgatgggtgcacggaccacgtttggagttcccgactctctgtgcgactctgacaccctcggccatctacaaccactctataagtaatcactacgaactatcttggtgtttattttgaatttagtgcttggtatactatagatgactcccggtgtttgaaatttgatatgtctgaaaagtcatcttatcctcaggaaatacgtcacgtcgcttcaggttctaacatttgtgcgtgctcgatcatatagaaagacgacccaaaaggcatctagtgctgaatgcttgtcttcaagataaagtcaaagacagaggccatataagcaaccgacttcttatcattgagattttacggcgcacaggtttgcttgcatctataagtgggacataccttgttcaatctttttgtcaaggtggattcagcctcgcgataggacaaatactcaagtgtttggtatctttaagcaaaattgcttggtcttaagcttctagcataattacatagtgtcagttactatgcgataaatcaccttgactcgtactactaccatattactcgatgtaatccgcctgcatgctatccgattaatcgatgcccggactagcacctaaatggactcgaactccttggaaatttttggtgctttacacttagatactgcaaaattacttcagatcaccataaatttatgtaaaggtgtttgcttttgcacgttaaacggggtacccatttggatcttccaaggttggccagggtaaggtcgacgccacgagcgggctggtttgatgactaagacctggcgagccctggcctgcccacattttgatccatcaacttcgctgtcccgacaacgcctcccatggccagaaatgaaaaatgtcttcgcgggactccagctcctctagtggaacaaataagtttgcattcgtgacagggaacattcattcagaagctcggagccatgctatgaaggaacactggaagcggcgacatcagcgcaataaagaggcaaaagcatatcaccagagaaattcatcgcgaaatttgcctctccgttcaaagaaccgcgctagtgaagatgcgagtacatcttcggggttgccagaggttggggatatggacattggcaggaatcaagaggaatctactagcatttccgcccagctgctatgtggtctgagttctgcgctgtcaatctcgaggcctgatccgttccagacgtgtcctgttcacctgacgagccagcaccaaaagcttttgcatcactgtgcgcatgaggatttcagaccttgctatatgtggaaatcttgctgacgggggtcgtagggataagcactcatgcggctatgatgtttgcagacctgaatgtcaccgagttcaatccgatgaaagatgtttggttcccgctggacctctcaaatgaatcgtctttcaactgcatcatggcgcattcagctgcgcacttatatcatttatacgctggaactcccccgcgacgagggtcgaaatcgtttgatgccttgaaatataagatcgaggctgtcaggatactacgcttttggcttagtgatcccaagaaggagctaagcgatgacgcttttgctgctgtggttcgtctgcttacattcgaggtgtgtcaactaatagcaatatcctctgtgtgagactagctgatcgcatttgacctagcgatactggggcacggtggaagattggaaaatccaccgtgatggcttacaaagaatgatcgacgccaaaggaggagttgaagcgctccacagaaattggcgcttgcaacttgtggtttacctgttagtgcagatggtcaaaagtataaagaagttgcgatactgaatatttgcagtgtttcgttaatgtcacgaccgtcatggctcgagtccacgaacaacctcgaacgactctctcgtcctcttttatcgcccaacgctacgcagaaccccttatcttgcgatgttcaaaaggtccgctgcctttggctgatatcattcatccaagatatgagaacattcatgggatcagtctacactagaggtctctctgcgtatcccttcactcatgccgccgtaggcctgttgcgtgagaattttctgctctctattgatccttctacccatgagtatcacaatacagagtgggaagacgaaatgctatggtgtttattttgcattagtgtcctaatgcaggagtcaatctccgccctgtcagatcaggatttaacagcatccaatggaccgagcacactacaaggattggagatatccctaaggcactctcatcatatgtgggggcgctcaatccaccacttgcgctccatcttatacgaaagcctgacaaggctcgttgaggaagggcaatacaagatgaattattttatggacctggtgcaggttctgggaaccttgagtttggaagcgcgccaaggagtcgagaaatgtcttctcaatttgctttactgcctggggaataacaaaaccagcgcgctattcgttgaagatggatggtcgccggattcgcttctgtcgtcaatgcgcgggcgttagagtatgcagctggatttattattatatgtaagtacatcacgaacgttagaaatagaataagcagggcggagtcatgaagggttctttcagtaatatccttcgaagcaagagaactgcatcaaagctccaaagttcggaccgtcctcttcgagatgctcatcttcaacgtattctttgaggctttcgtcgtctttcttcagatcggggcggaaccctctctcgtcgcccgtacttgtcctcggtcggctggccctcgttttcatggtcgttttgctgtgaccgttatggtcgctcgggttcttaccacaaaaacactccttgtgcttggtgggctgctgagtattaatcatcatatctcggcttagcatttcaggatggaagactgaatgagtggccgaatcacgaaccgtgtggctattaactattctgtcagaatctaggatgaattcatccctgatacagatgggtcacgtgattgaccaggctggttttactgcagaaagaccaactcagtggtttttcgcctttcatttcattttgtttgtttttgattactccagtaatgatcattccaagccacaattactaacaaacattcgaataagcttagtcttacttatatctgtaatgaaaagcatagttgccatactgtcaatttgatagagagtcaatttgatagatacaagtccacatgtgcctaattcatcaccctaaaacacccaaaattatatggcctaagtccacccgaaatgacttatttgtacaagtcagaatggtcacgcttaatagcatcggcacccttctccgcaatcatgtaaacggagttctgaatccgacagtcgggaatgacagggatacaagacgcgtcgattacacgaaggttcttgatgccgtgaaccttgaggccgggatccaccacaccttgttggatgttcttggacaggcgggcggtaccgcaaggatggaatgaggtctgggagcgatcgagcacgactctcttcatgagcttgtcatcgtgcagcggcatcggccaggggtactcgtcctcaacgatgtccttgaagccctcgccattgaggaggatatcataggcataccggataccctcgcgaatggcaataatgtcgaggtcattgttgaagtagttcagattgatattggcttgctgcagggggtcgctgctgtggagcgtaaccgtgccgccttcagagacagggcggacaagatccaccataaccgtgatatagttgcccttactaggggtaggatagtgccactggaaggcactgccaaagagacagacaaagtcaagttcgaaatgaggctggccgtatggacagaacggatccttgttatcgttggcggctttcgcttcacggtacaggggatccttctccaggtacttgtcaattcgggggaacccaaccatttcaaggaatccggagcccaatggaccaccatgactgttttcgtaggcttgaatggctctatcgttgtgtggggttcctttccgtaagataaaatcgtccataccgaagccatctttgagacgaagaacgaaaggaacaccggggtgatccaggagatgctgcccgacatgagggctatcaagaatcaccgggataccgtgcttcttgagttccgcagaaggtccaataccactgagcatcaacagcttaggagtctcgaagacaccttcggagacaataacttcacgggtagcaaagagattaagctcctgaccagagcccaagataacagtaacacccttgcatgtcttgtccgcagcatcgataataaggttcttcgaatgcgcttgaggaagaatagtgacgtttggcttatcggcaatacacaggaagctgccagagcgacgacccttgtagattgtgttgacactatgagtcaggccggacatagtaccgtcgaaaatattctcggttactggatgaccagtggatttccatgccttggtgagaaggtctctgaaaggcttcatctcggggatgagttccgagtgggcaatcgggatcggaccgttactgccaatcttcttcagctcaggcgagtaggcatttgcatcgtcgtggtaggtgacactctttcgcaggtagggaacaagcggatcccaagtccactcttttccgccatactcctcccacatatcaaaagttccctttgacccaggtgcccaggtgaagtagttcaaggaggaactgccgccgagaacctttccgcgcgtgttgggcttctcgatgcgctcatagtcatctcgcttgaccattgttgttttgaacgcccagtcatactcgctatcacgaagttccatcgcgttagaaggaactcggatcgcttcaaggtccttggcgttctcgacgccggcttcaacgactaggattctagcattggggttctcagccaggcgaccggcaacgacgttgccagctgtgcctccaccgacgacgatgaagtcgaacctggcattgtcctggacaacagtcatgttgagaagtgaaaaaggttgagaagttgtaaggaagtgaattatctgaaaaaggtgatctgtctgcggagtgagcgacttcgagacgccttttatatctgacaggttgggcttttcgggatgaggagaacgtctttcatgagataaccagcgcatgcattcctcttcctaatacctcatgtggcgtcattgatttgagtagagcaaaaaacacgcggttccacagacaagggcactgtattgtttactactggtcttacgggcacctagctgaggaaggtcttactagtgctgagccaagtgatccacccatattttacggccagtgttctgatggtcatcctagagtttacgacgtggcaatggctcataccgacctgtctcgatcatgtctaacttcgtttactacttttcgtatggtcatcttagagttttcagtgtggccatggcttgtaccgatctggctcgaccatgtcgagatgtcacaggatctgcattatagacattcggcggatatattggcttgacctagtggatagaagcgaaaagctagcttctctatccacgggatggttctgacggaatgtggggttggatagatacatagatagtagatcaggatgatcgcacctttgagcagcttaggtggagctccaccagatgaagtgggccatttgttgttgcacgttgggcggccgatccatgggttggctagatactcaattgagtttcggtttgagacacgcgaaaagtgaattgtcaagctggtggaatccagatgcacagctgcaggagaactagggctagatggctttatgcctgcttgacaaagctggtcgcaggtctgaatgagaacgtgagagtctgaaaactagtattttagtttcgggaggtcaagaatctagcacttagcaggagtggcgggcttcggatacggcatgcatgaatactcctatgctaccctaaaccgatgaggcaatagcattcgaccagttatatatcggtatataactagtgattttcccactacccaatcaaggcagaaaagcctctgttgggagtagaggagtagaattcaggagtagcgggcttgatgtacggtatggacactcctatgctacccaggatcaatgaagcaatagcattcgaccaatcatatatcgacatgagtttggtgattttcccactacccaatcgaggtagaaaagcctctgttgggagaagaggagtagaattcagcacttgggtcttgtcttaattcgtgcggagaactgcgtcaggttctagtgtctgcataaattggggtctcggttgagcggaaaactgaagttcagtcaagagtggatctatcggtttcaaggcatacgttagcttctttaggaaatgctagtcgacaaataacaatcgtgtcgtattgtagtgacgtaattatgcgggtccctgaagcttgtacagagtacctgggaccagatacagatatgatgtacaaccaaacacagtactcccgagatgacagtcccactagttgtagatctgacacttcagaggcctggaacggcagataatcgggttgagcttgaatttagcggtagctgaaagcggtaatttcgtcagaggtagatatcttactgagtataattgaccactgagatggcggaagaaaatacagtgctaatcaagatgtcctgaatggtcagtacatgtataatggaagcgtcattaacgttggggaggaatggcggaataataaagcagttcactaagaagttcattagcttaaattggagagccctggctgctttgttctgttacatttcccttcacatatcgtttgccccaacatttaccatgtctgccgataaatattatactcttgcggaaggtcagcttttttggggggcatggggggattagcaatcctacaagtactaattctggaacaggatgccccttcgctagcaacaacaccgcgctcttgatgcggaatcgtccaggaactggcggtctaggtctgctccaagacactcagctcattgagacactcgcgcacttcaatcgcgagagaatccccgagcggtatgagccggtctatctactctacaatattgatcttaaactaattggcgttgtagcgttgttcatgcaaaggccgttgggtaggtgaaattgggtggttgaaagttggtttgcaacaggtcgctgactctcgctcctattgtagcgcatatggggaatttgaagctaccgaggactgctccaacctgacctccgcgagcttcctcagcaaagttggaaagaagacccctattctccttcgtgtttccaccgtcggtccggaatcgggctctgcggatacttcgcgggacgttcatggatgggcgatgaagatgtacaccgacgaaggaaaccttgactgggtcttcaacaatacggtgagtaacttcatggtcctatactaaggtaaaagggctaaccaaaatttcaagcctgtgttctttattcgggatcccatcaaatttccctctgtgaatcgctcccacaagaggaatccccaaacccatttgcccgatccaaacatggtaagtctccaattttgatcaccagacaatccaacaatgaattaacatagatttagttttgggagtaagtcccttagatacaagcttgattttctgcattaatgacatgctttagcttccacgtcgggaacccggaaggcatccatcaacttttgattcttttcagtgacagaggaaccccacgatcagttcgatttctcaattcatacagtggacatacatacaagttcacaaaggcggtaaggacgacagccttggtgacgattacttatcgctaactggctaggatggttcattcaattacatcaaagtccatatgaagacgcgacagggcgtgaggaatttcacacaagaggaagcaactcgtgtcgcaggagaggaccctgattatatgatcagagatatgttcgacgccattgaacgaaaggacttcccgcagtgggatgtttttgtgcaagtaatgagcccttccgaagccgaaacctatcgctggaatatcttcgacatgaccaaagtctggcccaagaaggacttcccattgaggaagattggtaaaatgactttgaatcgcaatgtgagctatggctctctcctgaaattgatgcttattctaactatttagcccgacaactattttaccgacatcgaacaggccgctttctcgccttccactatggttcccggatttgcagcttccgctgatcctggtaagctacatctccaatgttcattgaatgacctgtggttgattcccgaatctagtcctccaagcccgtttgtttgcgtaccccgatgcagctcgataccgtcttggtgtcaactaccaacagctccccaccaatgctgccaaagtccctgtttactgtccattcgaacgagatggagcaatgcgattcgataaaaattacggtgctgaccccaattacgttggatctaccctgcagccaacgcagttcaagactaaagaaaacggtgttaccgctcagtcactcagcgtccataccgaccacgagaaatgggctggcgaagtgtcagcctacactagtcagattactgacgatgatttcgttcagcctgcagctttgtgggaaatccttgggcgcgagccagggcaccaggacagggtcatccataaccttgcaggaaatattagtggggttacgtcacccaatttacgcgagggtgtttacggttcgtttgtcttgtatcgctttcaacttatggcttttacttactctgaactctttgcagcacttttcggtcgtgtcaatcaagaactcggggctaagcttcgaaaagcgacggaggccaaggttaagaactgaatggctcgctgtctgtccagtatggtgaggaaagaatatattgcaagggaaagaaaaagagaaaatctgatgtcttgaatatctatcaaaaattatcgcaagttatgctcaatttactgtatttccacgagaccaatgttcaaccatcgtagtaccacacacttccccagctgcaccaccgacggaaagcacgcttccctcatagtctggccacaaaaattgatacatacagactttatgcatactcaccacatggtatgaatccagctatgcagttgtacagttaaaagacagatcgttgacttttgaatctgatctgatgcacgcatacaatctacgagtctggagaaggcggatgatcaaccaatgcgaaactgtaagatagattggaacctcggaagactagctgcttccctgaagctctctagatagctttatataaacaaaagcaccaagatcatctcctctggaagccaggtaatttccaattgaactgcttctcccctgcatgtggtgtctttgatttgtgcataaggacataagcatccatagttaaattttttcgataagcagaggaagaagcaacaataatacgtaaataacattgcagaaggatggagaaaggaagctaccaatcaggggcattgcaagcctttatttctcaaggatagtgcagactacaccgatcaagcacctgacattattctcatcttactgcagtgtttataactaggcataaggatttccgagaataattgaatcttcaagtgtcatttgaatagtcagaaaaaaaaaacagctaaggaatccagcgagcaatagaatcacatcaagcctccataggtctggccctcggcttccaactccttgtccttctcgtagtagtctttgagggctttctcatccttcttcaggtaatcgtcgtagaatttcggtttatccttcttgttcgacggttcattttgcttatcagagtgggcgtcttcttcctgattgtgcttatgatgatgatgctcgaaaatcctctcgatgagaggttctttgtccttgacaggatgctgagagtctgctttgcttttgttagccccgcaagaagtcatgcattaagcaaggcggcaaaccttcaggcatgttgatatttggtgggaaatagcttggtcactttgcgatttggcaaggaaatgagttgtacaatcctgtggaacgatatataaatcacaagaagcacctcttagctttgacatttctctctggccgaccgagcttcaatgacgtggatgacctcaaaacgagctgatcccaaacattcctatacgggaagtgaggtgtgaccgcattttgagtttctatttgttgtccgatcgtggaacaactacctaactagcggacgaatgctttacaattattgtcgggtctcgaattgcgggtaaccaacagcttagtgcaatctagtagctcaactctaaatcccttgggacgccgtcggttcactgagaattcacattctctgctttcatgcccgcttttgagcaaacaacatggagcgttggtggattctgcctgggtgtaaacgtcatttagactcgtgtttgaagttagtatggggatgactgttttgacctgtctaggtttctcctacgcgaacaatagccttccaaacggacaagaaatgacccaggtctgagcccagggaagaattgaacggtcgtaccacaatcatatcgggcagaaggatacaagacgaccccaatcagggcaaacactgccctcaagtaatgccatgtctcactcaagaccgattttgtaacgggcaccagcttttttgcccctgctgggaaggtccaggtgcagaacggcagtagcatttaacgaattaggtttctgcattagtagcaaacacactttattagcagccatattcgatgtacgatagtattagaagtcttgagaacagaattggtgtggacctgcgacgaaataaacgagttgttgatccgcctctctgaatcgggtagtactaattggccaatcagaagacgtatctgccgtatatagcacgcctcccacgccgatccccgagatcagcaaagggtccgtcctactggactagcttggagctcggagtcaagctgctatactaagctttgaaatccaaatcctctgtttgggcggtacagtacagcttcagtccagatttgctatcttcaacctcgatttatcagactcgaaaatatcgacttacctccttatacctggataccgtgacgaattgagcagtgacaacttgtcgtgtttccaagaaatcaacggaaggaccatccatcaaaacgttcaaacgaacaatgagcagcttaaccaccgccagcatccaacccgtcatcgcccccctcacccgaacagcaatctttctcgttttatcaatcacaaacacctcagccattccaaccatccgctcaactctcgccagcgtctcaagtctagccaaaaatgtcgcctttcgagactccgacgctaacttgacctgcacggtgggaatcggcagctccgtctgggacgaactcaccaacaacctcccgcgacccaaagagctccacccctttcgcgaagtcaagggtgccaaacacaccgccatctccactccgggagacctccttttccacattcgctccgaacgccgcgatatctgtttcgagttcgagcgccagcttatagaccacctcggtgactctgtgcagctcgtcgacgaaacagttgggttccgctactttgacagccgcgatctcctcggctttgtcgatgggactgcgaaccccgtgggcccgggcattctaccgtctgtccttgtcacgatggaggacgatccacacgcccaggatggcagctacattgttgtacagaaatacgttcacgacctagctagttggaaaacactaccatcagaacaacaagaggagatcattgggcggaccaagatcgataatattgagcttgacgatgctgaggacgggaagcaggcctcgcacaagacgctgaacacgattgaggacgaatacggcgatgagcatgatattttgcgcgataacatgccctttggatccccagcgagtggagagtttgggacttatttcattgggtataccaggcggctatgggtcattgagaagatgcttgagcggatgttcaaggggcatccgcccgggctgcatgatcggttgctggatttttcgaggccgttgacagggaacgttttctttgcgccgtcggctacggtgttgaatgggcttgatggttgatataaatacactgttgttttccgtcaatctcggatagctagatactaaagaactaaatccaatgagtaggtgaagaggaagtgatttattgtactttccggttccctatttcaaatagagagaacttagcattttacaacaagaactagccatgcaccagagaaagatgttttttcaagatgctgctttagtgggaaggcaggatgatttttgaggtctacatgtttccccatacttgctagctaacctacaaaaagtttggtcttgttttgctgctctcgtcttgtctgctttgccaaactgcccatcgtgaatatccctcttcattgtatatatatcaagtactgtcaccatcgtagcttattgctctacttcgccttacttactccgcgtgattcgtaattcatccttgcatggtgctcatattttagtgacgagtcgtaatgggcttgatatccgtttatgttgcggatacccatggcagtagctatgtcgttttcatccatctattttgcacagttcataatattagttgatcacatattttcgctcacgtagacatatacctgcatcaacatcaaatggagattaacgaagagagcggtgcgactattactagatcgaagtgctgactgtcaaacccaagctgaatatcatagaaatgcgttctatgccatagactctgatcagtcatgaaaagatgctactggatcgagaaagcgaaagtcactgttggagatgaggaatctaggccccatccgccctgtattcaacctgtctagcggactcagctcattgtaccttgaacaagtcagagcttatcacctattgtcttggtatttcattcgatgcctttttccgcctactgcagtaagattgctgagcacaaacacgaataaatgatggatgatcggtcaaatacttacgtttcaccgataaacaacgtccttggatggaaagattagcgttgaatactctcttcaacgcgacgtacgtgcataaaaaggctgctgtagttgtcctcccgtgtttgaaacccaataggggcataagggaagttgaaattatactcgcttcgctaaccggaaacgaattacacctgtccagagcaactttcggcaagccatcctaccatatcggaggaaagtccaattcggcccaactgtactgaaagaaagttatggggcaattactgaaacatataaatctgatcgtccgcaagtggaggtacaagtcgctatgctaatatgatatcggtgagccccactcctatatgaggaaatactacccaccaataatgtccatatatttagacaatcattcgttaattagtacttcctagaatggaatagaatgtaagataaagtaatgaattgctccattttagttgcgtactccgaacgaaacgccagttcagttgtttaacaagagtattataattatggtagatgagaattgctcttgttacatagttgagcagctcacagcaattcagcttcaaagtacaaaggaggcatgaggccatggctcagcaattgcatatgctatgggcattaatacaaaggtacacgatgcgatggaggacgtaggtaaattacaaatgacgaggtgcacgtaataaatataaatttccaaaagtagatgacatggcttttgccttacgctgagaaatgagaggtaagggggcttcgtgagttttgagccctaatttgtttcccctgcaccaagaatctcgatctcactgtccacatagtatggagagcgatggattccccaaatgaaaaggaggtaaacccgctcaatactacggaagatgaaatgaataagcgccatgcttctggtgacctagtatcttctgaatcgatactacactccaatcagcctcatttccagttcgtcgaaagcattgaaaagcctgttgcgcgcagtcatgcaatgaagacatattggagacggaagaagggagagcaacaacaggaagaatacttgaaacccaatcaaccgagtttgcgaccgttgcgaccgttatccaaaccgcgagcagtccacgaacctgagacctctaccctgctttcgccaacagaagaggcttcctccggccatgggtatctctcttgttcagtcaaaagtccagaagagcttgggatccctgaccagcttttcgctaacatcagcttcactttcgcctgtgttttgggccaaaaggttgaagcaaactcatttcagatttcagcacatcatcaccggtttttctatcattgtgagtgcgtttttaatacagcagccttactcagcaacatcaaggagactgacagctcgattttcttatttagggctgagcatgcatgcgcatatcatacattcaggacttcaggcgcggacctttactccattcacagagatttggatgccactcgatctatcaaatgctgcatcattcaatggaatcttggctcatgcagctgcagatctcatgagatttgaaggaggtagaagtaatccggagcttctgaaatacaaaacggaagccatcgaaacaatcaataaatggcttggtgatacagtcaacgcgattacggatgatgtttttgctggtgtcgtgcgacttctcacatttgaggtatgctattttccgcagcttgaagaaggtaacggttgatcgtgccaagagtcctgctttatgctgatcacgcacgaatgaaatattcacgggactaagatggttgttatacgcagagacactggggaacacgtgaacgtttcaacatgcacaaacatggacttcagcagatggtaaaggccaggggaggttataaagctttcggtccaaactggaggattcagcttgtcctttccctgtaagtcccctatcatgtccataatctcattcgtcatattgcgactaaagtgtcaggctttctattgttgaaataccggaacagtcatcgtctgtgtcgtacttgatggaggaattcgagaatcttgtatacaagatattagatacttcctacttgcctcatcaatccccaaaccagtctcaccacgccaaacaactcacacacctcgcgtcattggcagaagcgataaaggttttgcaacatcgacggacaacagaggacgtcatgcgtggagagacacggcatcaacgggaagcagtctctaaatgtctgcaatgtttactttttatttgggccacgctccaagaaagtgacgagaggagtattgggaatcagtcgaagcaagagaatagtccttcattcgctctcaatacttttcttcatgcgtcacgacatatgtgggccaagtccgaggatgaagtcatgtcaatcatcttggatgacttcgccaaaagaagggaaaatatggagaaaactgtctttgttacgacggtgattgcatgtatcaaaggtattagtcttagagccctatatggggctgaacagtgcctatcgagctattggaactagccaggggatcaaactcctgaccaggcaattagaatactgaaaatgataatttaaaaacccaatcagaaataaattcaaagaccttgagcgaacaacagcagggtccatttaagggacagtcatggacgctttagctcccttataagccgcaagagaacacatggtggtttcggcaattagatattgcgcagtagctagggcactgaccagagatggcgttaaatatacgacagaaatcgccacagatttggagatagtatgtaggcgtgcatagatggtgttcagacttcagcaaagtcctatcttttgatatcaaatagacgactcgatacattttctacacaccgaattgccaacatcaaatagtgcatttgatgtggttgttctttggctgggcctacttcgcacccgttaaccaccactttgcgggtacgaagacccatagcgctcagggttcaaaccccttttaggaagtattttgatgcctgaacggcctaattagcgctactctttaaactgctctgtccaatgtaatataaatgattcatgtattaatgaagcttttggcaccgtacaatcagattagttgattcgtaatcaggatcatctaaatataatagtacctaagatatcccttaagctctttttaccacttagtcttcggttgcgggtggtggctctaattaatcttcttcgaggagacttatcattgtatctgtgctatacacagaggacattgccttccttcataaggacttgcttttctggctgaagttcataccagatgcctggagaagatgatctcggcgaatacaacagaccaagcttatttctcctcgctaatgtgttcgtcactgtattgctctgcgtgttgagtgcggctctggcggtgaaccttactgtccttgcttaggaagctagcacgacgaacagcatcatccccgacatcatccaaagtacgcaagagtttaccatttagaccatacatgtggggctgggtgtgagcaagcgataccacattgaagacgttgctagttttgtgtgcttgtgcaaccttcacatccccagctagagatattggtagactcagcagcggaccttgtcaatgagaaatgttttgattggtccgctatacgagaagaggccgccaaacttggtatgtaataaaagcctttttaggctcaccactgtatctcctgctatattttgcataacagaaagggtccaactcgatgatgaatattttgtcacaaaatgattcatgcgtcggtttggctgaaaccaggaagtgaatgactcgacttccaggaacgggacgctgttatgtatgtaaaagtccactaatagaatctttcctcccccaacttccgcacgaattttatgccgatcctgagatattcacttggcctgggccattaatctccacggtaaaagcattcaaatcgtctccggttatgattccaattttaacaaattctactacaaaggatgaaagcaggcctttagaggaaatagagttactgaaggtataaaatcaaagacgagagaaagctgggtctgtctgatagtttagagcgggtgtctgtaagttattatgaagatacaaactgagaagatgcacgctagatatattatgtatctgctcaatagcgaggggaggacggctcttttctaatttttatacgcattcgcactatatttctactccccctttaggaaagtaacgctataagtctaggcccttttgggaaccggggctcatactgtgaaagcccgctactaagctactaagctcgtgagcctccagaactatactattgagcgctacatgccagttcctttcggaagaattgagtacaattgattcaagaattctaagaacgagggaaaggaaacaatctacggccacgactgggttttatactcttcctggcgacctcgccacaagccaagcaaacaccgtcttcgcttacagttttaggaagggacgactcggtctgcaggtacgaggtcgggggcccaggtttggcaggtacgcagtcggtatcagtcggcagatcgtcagatcgtcacattctataacgatctcatccttatcaaactgtagaaggaattcaataaatgcgggaaaggatctcggagattatagaaggagagggacgatggttataggctttataaagccattaaacaagctctttactagatggtaacagaagggtcgacgttctggaaggttaggatcgatcggtgaggcattttgattggtcaaaaattggtcaaaaaagtcgaaaatgacgtaacaaaactattccctcctcagccgctatgtaagtgcttctcgccatctcttcctcgcaaaagctgatgacccacagatgaatatcacccacagtgatccgagggagacttcgttggtccagatgaaacggtacctgtccggtgacctggagcgcgtgggtcagaaggtgcgccaacgcttggagtccagtcggttggcgcgagggctgctgaaagtgatcggtgtgttggccgtcactatggtgctagctgatggcctgctcacaccagcccagtccgttctcggagccgttcaaggcattgaggttgtgcagccgagcatatccaaaggtacaataatcggtatcactgatgccattctcgttgtgctgtttttttattcagccgttgggaatcacgaaattatccttcgcgttctcaccgatcgtgattatatggctcgggtttaatgcggcgttcgggatatacaacctcactaaatacgacgccggggttttccaggcttttaatcccggcctcgcgttcgaattcttgatccgtaacaagacagacggatggaggatgctaggtggtactttgcttgccttcactggtgtggaagccctctttgcggacctgggcgctttcagccgaagcgcgatccagatcagctggctgtgctacacgtttccgtgcctattgttagcatatatcggtcaggcagcgtatatcagcgtccacccagaggcgtattcaaatccctttttcaacgcggccccacctggaaccatctatccagccttggtcatcgcaattctggctgcaattgtcgcctcgtaggctattattaccgcaaccttccaggtgagagagttgcaacccttgatttgggagaaggtctcactctgacaatgctggcagcttcttgcacaagtgatgaaactctcctatttccctcagatcaaagtcatccatacttctcagatcttccacgggcagcttttcattccgatcgcgaattggctgctaatgatcggaaccatcttgatcgcatcgatctataacaacgtgagtggcctcttcctttccctatttcattcttttccggcgacttatctcatgtcctccagacgacgtccttgggtaatgcgtacggcgtatgcgttatgtttgtgacatttttcgacacctgcatggtttctctggctgcaatgttcgtatggcggatcagcccgtacattgtcctcctcccgtggctcaccgtggcctgcctggacggtacatatctctcttctgcgctgaccaaggtgcctgacggtgcctggttcacgatcgcgctcgctgcaatcctcgccatgctgtttcttttgtggcgatacggcaaagaacagcaatggttcgccgaagccgaggaccgcgtccccactgcacatttcatcgtatccggttcagatggtcaaatgttcctgtccaaacgatacgacgaccttccagtcagcatcacccctggtcttgggatcttcttcgacaaagcgggcgagacgaccccgattgtgttcagccagtttgtgcttaagctcacctctttacctgaggtggttgtattcttccatctccgcccactcgagcaaccttcaatcgcccctgagaatcgatttaccgtgtcgcgtttggccattccaaattgttaccggctgattgttcgatacggatataatgacgagatcatcacacccggcttggcgagcgtaatagtccaccaggtccgggaatatctaacgtcgagcagtgccagcatgcccttagatggggaggatgagggaaaggattctgtgactcctggcaactccacgacggaaggcagtagagacgcccgcgctttcctcggttctgaaattaccattctggaagcggcatattcccacaaagtgctctatattgtaggaaaggagcagatgaaaatcaagcccaacacagcacgcatccgaagagccttgctactcgcgtttctgtggatccgggataacacgagaaacaagatggccaacctccggctgccaatagacaaactgattgaagtcggattcctcaaagagatataagtgtggcgataagcgatctggatgaaaaaaggcgcaggatgttgaagaatcagcttgaatcgccgctgcgacatagtacctccgtgtatctcactagcgaactgtttatattgctttttgtatgacagatagtgttactgttcgcggacggtataaagtacctcttcgttcagcggttgttccaatcttgttgtctccaatttcatcttattcaggctgcctaataggcgcagtcctctcatcaacccaagacaaactgattcagagatatcctgagatccatccaccgcacatatgtttacgttttgcctttcacaaagtcaatagtcaaaatttgaaaatggttagaggtggtgcatcgccaatgtttataccggcacaaggtcacgatttttgcatcgctaaccatggtcaaaggcgagaagcaaacccctagaatatatgttacgtatacctagggggtgacctcggtatgatggcaagaaccaacgttggaaggtggtagagtccacattgggagaccggaggtacatactttccaccattttattggcagcggcccaagtcacatcgccttgatcaatatctggttgtgcctttcttttttcctctctctttttcttctttccatctgtctatcttgacgattttcgactttctatttttcctcttccactcaaactatcttcaagtttacatttgaatcccaggaaaagatgattcgaacggcgacaacgctgagccaagccataaatgaactccgcgctgctaggggcaatatctcatctccgcagttttatcaactgatacacgagcaagatgcgagactcccttccgttcgtctatcattgttaaatgcctctgaagtcgaatacatactgtgcctcgagccggctaagactaatcagggattggattcctttcctacaatcgccccgcccgagttattaagtgagccacaggaatcgcagagggggatctcgctaacttcttgaagtcaaaaatctcgcaatgaccgacgatgctttgaagaacgaaaaaaacgctgaagctagtatgcgctggaggatgaatcacttccttctatttgcatttaacacagcaatggacacgtattctgaagagaaaagacttctggagatccactgtgagcctagatggtcattcggacccgtccgatataaggaccaggccgtgaagctatcaggatacccatcttacgccctatggtacggaaacgaagacgaagccgctttgaatgtcattgtggcccagaatacgaggtttaagcggcatgataagggaattccggaagttctaggatacatgggtgagtacaatgtaccactgatgaagtgctcattaactgatttggtcgaaggtttcgtccatcatcatcgcaagaatgcaaataaattgaattctccggtctatggggttgcaacggactctaaaacgtttcactttgtcaggctggacaataattccacggtatacttattcaatatgtctcacttgattgaagagttacattctaataccttctagtttatcaccgcaacactggactctgaggtagatctagaaaaggtgttcagtctattggttcatatcttgaaagaagcattgatcgtccaatcgactcaaccgaaagagccatctatgcaatctaatcaaggtgaaggatccgtcgatcccctcgtccccgtcgggtcttctcttagacgaaaggttgccaaggagacacaatatgaaaagctgaaagtggccgcagctgctttggatgaggacctcgattattatgacatagatgtgagggacctcgaactcgaatttcccgaagacgagacctctgaagatgagtattctgaagatgactaatgctttgaagttcggctccaaggttgcttccaaggctatcgttaccttttttgctatttgctaaactgggtgagcgtacaataacagtagtcacatcttgtctgatattcacaacaacaagcaattatttaaacatatcctgccttctaggaaaagtgtcttttgcgtagtgtagctatgagaaagtcaagtttattaatatggttgatcctacgccgattcatgatacttggtaaggatgatagacccatctcaagggttgagatccatattcatctcttcggaccccaccccactgtaggtttctgctgaggtctcctttgaatgggctggggagatggtagctgccttccggagcatccataccagcaacccgaacggctgctccagagctgcctgacgaccgacaacagcaaattccgaccactagtagatgttagaattccgagttcctgacgttgggttcttggctgatataaactagctcaccttcgaatcgtgactgatttttagaaaatgccaaactgatccagtatacgccatcccgtaaacaccacagttgcgcttctggtcattcttgcgtccccggtggatacaccctttgataccaattagctttcccaaaaaaagtatgacacatatagcgagatacatacccatatatcccaggagttgggggattggatccttggacttcgctccgcccttagcctcaacgatgaggacgttaaggcacaagccctcgctctcaccataccagacactatagtccattcttcctgagaaaacaacccgcttatgattaagagtcaccgggccgaaagaataggccctctcgcattgaacattcaatggctgggcatttgtgagattcgaagtggcagtcgtgtacgcattgagggtgacagcatcaataaaccaccgagttctagcttcagtgggtcgcgagcgaccaaatgcctgttcaataagagccaatgtggtgactataatgaattagctgtataccccttctactctatgtctgatatcacataccgaggtgggggggtagggcgagcggctgaacattcttcatctccaggtcataggcatcgtattcgagccgaagagacctttcaacctccttcaaggtcaggtctgagactgggacactgtcgtagcgtttcatctggccctcgaccttatcagttgcagtcttcagctgttgtttgtcgatcctctcgtcgaggaacttccggaccgacgatctgagctggcggaggagcttatgacgctcctttggtaaaatctctgtggcgatcattgcttcgccggtggacttctcggcaccaggcacgccctccatacgctcggcactaccgctcatcgttgcagagtggctggtagcgatgtctagtacggtgcaaaaaattggagtgatggaagtggaagatgcaggatgagaggagagttgatatgggaagaaagaagaaggaaagtactctagaaaaaaagtaaggtttcagccttgtgggcagcgggtgatggaccaagggtccacggatatcactaatctggtgcggaccggtatttcctttcctctttattttctttccagctctcgctgtgttctctctttgattcaattttcaagtcttcaagggagactcattcaagctaccaaaaggcaaaccaccttatcgcttcttattccctatgttctcaaccagaatggcagagtaagacccttctccattaccagctgcccgtaaacgaccactcgaggtggtggcgcatacgaattatagtttgttgagcgtagacgacgcaaattccgtctgaatctaacgtactatggcttacagccggcttctatactgtaatgaccctaatacggtccagatttgacttatggcctgcagccggctttcgtttcccgtggcggaccgtatacggtctgaatttaacttgcgaataccagaccgaggttatgttaatgaaagaccaaagaaagtggttctagaacaaagaataggtgcgaatgtggtagaatgctagtttctttgatggttgtaaggcggccgcgactgaaagaatgtggatgaccacagtagataggatttactttacttcctaaaccgaaagcgaagttaatgtttgcatggtttgcaacagggtcgccaggaagtgcatgaaacccagtcgcggccgtagaatgttttctcttttcctttttccttccttatacccagaatccttaattgactatacgaacgggcacgcaatacccactctatagaccccgaaaatcctttttataaacctaaaccgcctatcgcactcggtactataagtataggtaatatgtcaagtacccacactaatatataggagccagtttgattgctaacgggccgtgatctatagatggagatggaatggtggacacgacgggaatcagggccgtccacggatccccgatatttcggtcggagatgacgacagtcaggatacgccagacgcatgggcacatcatattatgagtttcccatggacgactcctgctggtgtaaacatcgtcaagggcgcgacagtctaggtcctccatcgaaagaatttccgggacaacacgcctggtagtcaccccatgtcgctttttgtgtacattggttatcgccggtctcgtatgtgtcatctcgacgaatagcgtatccctttacatattcctcggacattgttgagacacgattgacgcgagcttagaatcaacggtaaagggatgcggggtggaatcggcctggcaggagtgttgcgatggggaaacaacattatttattacggtcctggcaagactgctgaaagtgggtatgcttccgggtcgaaatcttaaaagactgggtcttcgcccgttatttgaggccagttacattccccgtttcgacggttcaatccagctctctatcaagctagacatctataagtgattgatctctctccctatgccatattttgtcccaaatttcgctccatcacttgatactggctgcctcattttttgaaatccatgcaagttcctgccgatttgagtattaatataccaggaagggaattcaggtgccaatagtcctaccaattgcacaagctcccgaacagcctgttccatataatccaaacttttgacagtagagatttccatagccgtaataagactaacgagcagtctttgatccttttcctcgaggtgataatccatttcaatctcgcatttcaatctaccaacatgtgatcgtaggcatttcctgatctccattcgtaccgatgtgttcttagcaacctcatcaattaattcagatgcctgaaccctttgtttcaattggttcgctcgctgatatattttaacctcagttggttatggctttagattgcttttgaaaggattcagcggctcaccatttcatagatttctgcaacagcaaccgggcagacatcatcccatttgctcttgagatgcttcagaaaaaggtcgaaaatgtcgaactctgagcgaggaatacaaccatttggaagtctgctacccggaaagctgctaaggaagacatcggcctttcctttcgagtctggactcctgacccatgcgataccgcatggctctgggcactgctcgtcgtttccggggatatgttaatatttggccgggaacgcaattgatacgtaagttatctcggtttcgagaaagtttttgccgatgtattgaacgtattgtgatttgccaagttcaaatttcatgtcacattcggcattgaactgtcttggtacacgagaccaaatttcgtgctgtgcacacacactgtatcaaagttagaatatagaacgaagaccccaattctttactcagtataatgttcgccgcccttcacgtgggagcaagtcatacttgggctttaggattggctgctaatcaaagtgatagtcaggaatgtattgattgatttgcacccagtaggtatcctcgtttccaagtttaagccagtcacttgaccgcatgtattcaagtgtagacattgagcttagtagcttcctcacaatgctctcgtttttttgatgtagagcgtattgtaaaggtgttcgtccagttcggtcttggcagtccagcaatggcccctctattttatcttccatcaatatattaaccagcctctcatgttgatggaagcacgtaaggtgcaaaggcctggttccttcgtaatcgcacctatccaaaatccagggatcaacctctttgccccaaagaacaagctttctaaacgtattcaacaatttttctagcccgtattccttttcataagtttctgaatggcgaattaagtagttcaacgagaggtctttgattttcttttgtgccatcaagcccacgacattctggtggttcttctctactgcccataacatcggagttcttgcgaaagtcccgtcggtttgatcggtccgatttggatcaacgtctttgtttgccaagagatattccacgatttgactgtcgccgaattgagcagcccaagagagccagatgcgtccaaatttatcccggcggtctggtaggagaagggagtctactaacttggcgaggtcgtggcgaggaaccattcgattttgtggtgtaagatcgattggcatactgataccatgatctaatctagctttaagaagccaccaaaagcctgtatgctggtcgccatcctctttatgtgggtcagctcgatagtcaagaagcaactgcatgatcaccacacgcgacttgcccgcggcaagtgagaaaggagttcgccctcgtgcgtattgatccacgttgacgatggaattctttgattccagtagctgtctcacggactcgacgtccgattgaataactgcgttgatgagaggggtgttgccttcacaatctgctaaatcaagatcggcatctcgttcaataagaagaccgataatgtctttttttggcctcggaggggcctggactcactgccattgacaaaggcgttcgaccataggcgtctcggtggttgactttagctgcatttgccagaaggtactgaacgattttggtagacccaatagaaactgctcgttgtagcggagtaggatcaagaccatcatctggattgttcatcgcattctcttgctctacaagaaatctcacggtctctaggtgaccaagttcgactgcacgtgatagtggagttcgaccctcactgtcccgccactccaccagggccccagctttctttaggagctttattgtttggggctgtcgtgattccaccgccaaaaagatagctgttctgcccttcgggtcggatagatttaggtctgttgtctttctttttaaaaatttgtcgatagtttccggtcgcatcgtggcttgccacaagggagattgtgatatctcgccgtcgcaaaagttcacgttaaaatcgtcacatttcaaaaatgcttctattcgttcgagtatttcgttctgccaatattgcagggccttcacattcttctctccttttcgctttcgcggttctctttggagtgtattcaaaaattctgccttcagagtgtcaaaagattccagaggaagggaatcactggtcggtttttcagtcatatttgtcgtagactgtggttctgatatcacaagcaagcaatagggacgaagtttggtcttggaatttagcgatatccttgaaaattctttttttttcaacctgcaaaaggtcacaaatttaataaattcccttaagctgagtagccaaaaataacatgcatggcccccatatgtgttaacaacttgcatgttatccaatgaaagagttatgttccgatggcacacttagtcgcccggagttcactaataactcattcggcaataagcagggtgaaatctaggtgagaattacccaagtcgcgcgaccaccgcgttggcccccttagctgtacatccacatatcggatattggatgaaggaaagacatattattggctacatgaaacaatatgaaagtggatctgtggcagatgactaattttgtttacttttgaccctttgggctttcctgtgcgtggatctataaagagccaacatcgcttaacatggggctcaaatcttggataatgtatcctccatcaccaccttaattagaactcccactcactgctgtctagagcccaattaatcttgtgaggggggtttgccaagccgtacagaacgtaatatgagtcagaccatgtctttgggggggagagaaactcagccgcgctgaaaccgcacatttggctagggaacaacagaaattagcacataccctatagtaccaccgtgggaatggaaaatcactcacattgacccagatacctgatcatagatcaggtttgttgtcgtagcgggggttcggctcgattccacatggcagaaactgtcttctcaataagtcagctccaatatcactgaaaggagagtgataacaaactcattgactcggcgaaactctcgacgaatgtcatcgcgagcgtcacgatctaggctccagaaatactcatccgaaagagactctccaggcaccttgtcccatacaatacagacagaaaatccccccgggaccgcatcgtcgttcccttgttgtgcctctttgtagcccaggagggcggaagtaacattacatgccatggacttgagcctttgaaatgcctttagtccagtgggtatatatatcggaatagcttggagtgctctggttttgggcttagtgtactccgtgccgatggttgggatctgacggtggattctcatgaacgcaagcttttgagtcaagtagtcctttcggtagcaaagaaactttgccatagtttagacagggccatgacgctcaacttccttctggctcatcagaagggctgattcctcgagatgttgggtgatgatccatgtttgggcaggcaacgagacatatggatcggcatctgttgtgatctcactgccttctaggctagccagaaacggggttgtgacctggtgcatgacaggctgatatatctttgcgaaacagagcgaaagtttgttgaaatgtaggcgcggaattggagagaatttgagaaataaaaaagatgatcaatgagtgaccacaggactgaagtggaagccttaggcttcaggctttacttctgtttacatttttctcttcctctttcctcttctttttctggataacctttttgtttcaattgattgttccaacaaaaacctgtgagtcgcactgcgattgtaaattgatgcattattttggaggtagtatgtgtatactgacgtcatattgcctatactagaatataccacactgagcactccccactgtggagtatggagtatataagcttatgttttgaaagaattgggttaggcgttacctcgtgattgattgttaacaagcggccaagggacggcggcttcaaaagtggggttctctttattacccgtcgaccttgccagcaagggtgcgttttggtcacaactcacggccagagaggaagattaagacatttattgtgggtacaagtccctgcgaagacatcggagctcgagcagaaatgagtttgttttcaaaactcgcaaatcatgcgctggacttcacctccgtcgccaaaagccatctccttttcttcaatggcggagattcaggctccgtccggggtcatagcgcggggtagtgcccgtccggggtaaaactcgccgagcccatagcccgcggatgagatgacaccgagacgtgtcctactctgggattcgtcaggttctttaaagatcgatattatttatcttggatcctacacgtccaatcgccacccagaccatgttctacagacatagagagatcaagcatcatgagcatccaacttcgtgttcggaggccagccgtcgaagacactctgaatgggtcacgttgctgaacatttgcccgtgtccaggtggtactatatatgtggagccaagcatagcgctaactaataattagagcttacgagtaacctctcctagctcgtcggttaaattccaaggtttactcgctcattatgataggctcgacagaggatcaggagggtcggatttcagagtggacaacaaggaaaaccctgggacgggacacaggcatgactcgcactgactgaacgcgggaggattctggactctcccctaagatccaaaggaggatattctccggcgaatagaacgccacatctagacgcacaccaccacatttcagcataccccgcaaatgcaccagtaaatttcctccccgctattacctatcagggcgagtacatatcagatcacttcgcttgacaagaacccgccataatcaagtgacgctactaccgtagtgccgggggaaatgaccctcatgaatagagatgtcggcttgtggaggtcaaggtccggagaaagcttcacccaattaagctaagatcgggaccataatcacgagcatgtcgtcgcgggtataaagatctgagacccccagtcgtgcctgcctctcttccattcacccgtttccccagaaatcgtcaatatgaatagcgacatcacagagaaggagacctcagcgttagaggtcgaggcaacgaattttatatacaacgaagttcgtagtaaagagggaatttcgttattactatggcggattaattggtaggccggaattatttcgtttaaaccagatattcgttataaccaggttcgttataaacaggttttactgtactcagatggaaagatgtctgcgttgctatctaactatgcctcgggagtgcttttaatcacatggccgcttagtcatcctgatctagaaaccccgcagcaatatgtatctatcctctttcttgaatatttcacacatctagaactccataaattatctctcgcaatggttaaagttctcttgactggtatgtgattttgacttaccctcgagcccaagctaactatctactttaggaggcagtggcttcatcgccgcccacatcattgacattcttctacaacatgggtatgcgttagccaacatgaaaatacagagtattggttgacagttttactctagttttgatacagttgttactgtcagatcggaggagaagggtaaacgcattattgaggcccaccccgatgtgtcgaaggagaaactctcttatgtgattgtcaacgatgtagctaaggatggtgcatttgatgaggttagtagaacatcgtgcccctgatagatacacaactaacggaaaaacaacaggccgtcaagtcagaccctccctttgactatgtgctccataccgcatctcctttccattttaatgttcaggaccccgtgaaagacttccttgatccagccatcaagggaaccactggtattttgaaggcaatcaaggaatatgctcctaccgtgaagcgagtggtaatcacgtcatcattcgctgctattgtgaatggcaagcagcaccccaaggtctacagtgagaaagaatggaatccagtgacatgggaggaggcgttggaccactcgcaagtttaccgtgctagtaaggtaagtgatactggacggtcagcctgagtaaatgcaagtgctaagtcagttccataccagacctttgcggagaaagcagcctgggcctttgttgagaaggagaagccgaatttcgatattgctaccatcaatccgccactagtatttggcccgatagttcattatctcaactcccttgaggctatcaacacctcgaaccagcgcatcagaaacctcatccagggtcaaatgaaggagaaaatagccccaacgggcacttttctctgggtggacgtgcgtgatgtggccctcgcacatgtcagagccatcgaagtccccgaagcaggaggcgagagattctttgtcaccgctggcttcttctcgaacaaggaacttgcggatattgctcgcgagacccatcccgagttagagtctaagctgccccctgcagacgctcccagcgacttcccgaaaaacatctatcagattgacaacagtaaatcgcaaaagatccttggactcgagtaccgcccactaaagcagacagtctcagacaccatcgattctcttctagccgtcggtgcttaaactcatttcatagatccagattgaattgatggatacattatgagagaacaaatcaaacattcttcttttacaacaacgtatatgagagcaatttcaagcaataaattccatcaagtgccacgcgtcttacatcttataataataaacatgagagttacatcctatagatacaaaactgtgggttaactacagaacggcggtctcggtcgttgtcgcgcaccgtaccgctttggcccgtgttctccggtcaacttttctcgcgccagctatccaagatcacatagtcaatccactgaacaagatggcctccgccaggctatcgccaacggcgaacttgctacgaaactcgcgtttgttcgcactccctaaaactctcaagggccgtagtggccaaacgtcgagagaatccgacaccgcgactctgcattatcccattcgagcctccatcgttacaccgcaatcatcactagcccgaggcgattggggattgaaacgaccgttaccggctaagtcaacatcagagaaatcatcgaggcctgtcgttagagtacacgctctcgatacatatgaacatgtcaccgacttcgaatccgccgcagatcacaccgtcaccctcgagaagttccaggagctgcacatgcctatgtctctcccctccaaagtcaattacgctacaagtgttgtgccaagacatcaaagtccgttcgaagcgcatctcgataacaccgagaccagccagggtctccaggaacctggtgccaagcaattcagacacaccggcccttggcttgccggacagacggagtcagagttcgcagcgtacttgaagcaagtgactcgcaataagcctgagctcctgaagaagcttcgtgaacagtttgttgctaagcggtctgctgagatccggaaactggcacaggataatggagaagacttggaagctcaccccgcaactgtcaccgatgcggagttcaatgcctacattaaaactctgcgcaatgacccattcgctctcggtcccgtggtctatgagctgcttgatctcgcttccccccctgccgttcccagcgagcgtatcgggcgcaagtactatcaatctcctggaagcaagttgtcctcattcgaatacgccgtctcaggacccccgaagacacacccgtctggtggtctgtcatacacacgatcacacgcgctgattcacaaccatgcccagtttggcccacaagcccaccagcgccccgtggaggctcgtatcttgcgccctaagggccgctttaagggacgcatggcgcgtgccctcgcgggtattggtggtattgctgtcgaagatttgaatgccatgacctttgtggagcaaggcacaccccccggtctgactttcttcgatgcgtccatccctggaggaggtaaatactgggttactcctatccgggcttcggttgactccgacggccgcattggcctttcatcttatcgcgcgagtgcaaccgccaaggctccttacggcatcgaagactaccacaagccgactactttgactatctccgatgttgccactgccccatccccgttggtcccgagattggacagactgccactcggtcagcctcggttccagccttccgcggagaaccgaccccggaggcaacccacgagggggacagaggatgtcgcacgcagccttcttaacaaccttaactctaagtcataggggaaagtgaagttttatgaggatgtgcaagggattgtaccatgtatgatagatttggtgcttgtgtaaagctattttcgttttcttttctgattatgtcatatataaggtgcatcaatatcaagttatttcgacagcggtaaaacaaccagacaatagattcaataattgtacgtatacttgaggatgtacttttgatttgtttcctacctttggatatcgcgaaggattacataatcagataagatacgtaagccacgtgactgcttgattagggccggcctagggcaatgacccacacaggactaagcgaaacccgatttctcaaacccatccaaatcagcacgactactctggatctttcgaacattcattccgccagccaacaaccgccaaaatgggtcgcgtccgtaccaagacagtcaagcgctccgctaaggtcatcatcgagcgttactaccccaagttgaccctcgacttcgagaccaacaagcgtatctgtgatgagatcgccatcattgcctccaagcgtcttcgcaacaaggtgagattatatacattggcaccaacaactcgagatctccaattctgatccgaaatctcttctagatcgctggttacactacccacttgatgaagcgcatccagcgtggtcccgtccgcggtatctccttcaagcttcaggaggaggagcgtgagcgcaaggatcagtacgttcctgaggtctctgctctcgacgtctcccagaccgagtccggccagcttgacgttgacgccgacaccaaggaccttctcaagtccatgggcgtaagtttccactgcacactacgatgcgttggcatatttctaatttacctctacagttcgacaacctcaaggtcaacgttgttgccgtcagccagcagcaacaggtcgagcgcccccgtcgtttcggtccccgctaaatccagcgcccggaataacgaaaaaaacaaaagttcatacctggccttcggtcgacccttggcggtacccaaatgtctgttctggctggcttttcgctcggctagcatggtttagcttagtgtggagggctattcctggatgaggaatgaataaacatgattctctttgagaaaggtgtcgctgattctccgaaaggagatgacgcttgattgccaattttccttcctcgtgtctacctacccatgagtttactctctggtttggacctacgtaggagttcttggactgggggttacctcagtccgagagactcgagacttttggtggtttgagtcatgcctggatttatacgtacatattctatatatgtacgagtcctgctggccagcctatagccatacatatggtctctgtagattgttcattactcatgcgtcaatgtcaacattgatcgggtattaataagtagaacgccgaaaatccccttcgaaatcccatagcagcattgctatcctcagatccgatcgagcaaatctatgtctccatcttgatcgacgtctcgtcgctccctgggcacgtatccttcaatggaaccgccccttgcatcctccggtcgcatctgtggagcggcagccacctgctgagaaccacgttgattctctctaatatcaacgttaacacgtccatccggacgaatcaagctggtatcgccgcgttccaacgcaagctcccgggaccgattgcgattcccaagtcccatgctctgtaaatcatccacaacggatgagatactgctagtagcggcgggtgccttcaagcgcttggcgcgagcttcctcgagtaatagaatagacgtgccccgcgtatcgcccgcccgtcgttcccacacaggcttctcagatagctgcacccggatccaaagagctcgctctgcgcatgcatccgagcaccacttttcgatgcggtcctgtgaaacaatctccacgctgcgtccacgccctcctggcccacttcctttaggaccgtatttaaactggaacccgcctcgcgggccgttgtcttgcttgcgatgcttgtggggacatagagcatacccgcacaagtcttcgaagtttcgctccaggatcagattgtcgtagtcgctggggcgaaatggggctagcgaatatttgagttttacagcatcttcttgcgacggcgcggctgggtccgctgtcggagaagaggggagctcgaggagctcaaggatgcggttaaggatgacatcttcggcatccttttgggtctgaatctgctgcgcgtgttccagtgcgacttcgaggtgctgctgggtcgcaccgggcctaccttctaggtatttgtcttgctcttcttgtgtagggtataggtatgaaggtgggggtcgctgggcattgatcgcggcatatgtctcgggaagagaggtcttgagagcgtgacttggcccttggtgtgccatggttcttaactgaggcccctggaggataagccaagggtagtttaaattgaagatgggttgagttgggaagtgagaggaaatagaaaaaataaaatcagcagaattcgactccaaagcggaagaggcaaaaccccggattgacccccaatgggaggagggacactttgactgctgacgtaggctttgggcatccaggatatgtatggatgtgtggaggttttatgcttgctatttgacatcgcataacttgtagatattgacatatggtatcctacaatatgcattatatacatactcggtacagtctacatatggaatatttctctcgacctaggtagttatatagcttcgacgtcaatagcctagctacataccaaactatttaacgtacatcacctaaaaacaagctgaatacccacatatatctagaatcggtataaattcccttggtatttcaacacatctaggcattttcccccatgtgcgtgttccttggttgatgtgttaagccgccgatcgtccagtggagcccatttccctcatcccgccaagtgacgaccacctcgctgctccgtacatcctcctcccctactactttttttttgtctttccgaccgtgttccttttttctcatcttgcatcaattctctactggccccggctacggtgttcggttctccacgccgtgagtgtttccgcagtcccccctccccccctcatctcccccgtaggcatccactcactgacgtccgtttcatctaagctgacacgccttcgtaccacaaaggaattgattcgtttcgccttaaatattgctgcatgctaaaggcattgaagccggcgattcgctctgtacagatattctagcatcattgcgtcacagactcgttcagcattcctcactccacaccgattgtcctaaggcctgaacatcggtctcggcttgccagatgtcagttccgcccttcacggtccgctcggtcttcgagtacgcgtcgggccacgatgatgacctcaacttcccgatcggtcaaatcgtgaccgtcaccgccctggaggacgacgattggtactacggtgaatactcagacgcccagggggccagacaggagggcatcttcccgaaaaacttcgttgaaaaatatgagcctccggcccctccgaggccatctcgacccaggcccaaaaaggagcccgagacggtgccagtggagtctcccgtggtcgaaagcaagcaggctgagcgcgagcccgagcccgcggtgcagcctacagaggaagattatgggattcaatcttcgcagccactgccccagtcccctcgtctacatgcgagtgcccctgtatcagaagttgtatcctcgcccccgcagccagcaaaggcgcccgctcccgcccatcccgtggccccaaccgaatccgcagccaaagcaccctcaaaacctgcgcctccggctgtagcggataagccctcggggtcatcattcagggatcgtattgctgccttcaataaacctgccgctgcaccggttacgccattcaaacccggtggttcccagccatccttcgtcaagaagcctttcgtcgcaccacctcctagccgggatgcctataagcctccaccaagggaacctgcgcccaagatatataaacgagaggaggatccagatgtgaaggaacaaattgcccgcgagcctccggtttctgaaagccggcctgcccatattgaaggtggcgaagagggagcagaggaccagcctaagccaactagtctgaaagaccgaattgctttgcttcagaagcagcaattagagcaagctcaacgtcatgcagaggcagctcagaagaaagaaaaaccctctcgccctcccaagaagtcgatggacgaacccgtggctcccgcagtcctcgacgaggaacaggaacctccctccgttgaagaatcaccggctactcgcgatactagtgttgatacattgagggctgcggcccctccttcacagccccctgccccattctcacccacccaggaagtcgcgagtgacgccaatgatgccgactactccgctgctgcagactccgaggatgccggcgaaacatccaccagcaaggacgatgaggaagatcaggctcaaccgcgtccagtttctcgtcgtcaaccgttgactcatgcagtcgaacaaactgccgaggcagatgttgaagacgagggcgatgcagaggaagaggaagaggaggaaatggaccctgaaactaaacgcagaatggagttgcgtgagcgaatggccaagatgagcggaggaatgggcatgatgggtctcttcggcccgcctatcggaggtatgccaggtatgccaggtatggctggtgccggtagtgctcgcaagcccaagactcccgtcgagtcagagaagcggcttggagagctcgaatctgagcccacttcccctgccaatgcgcccccagtccctatgatcccacttcctgggatgaacgcggctagcaagccggtaccttcttatactgaggtggagaaggaagaggaggagcctttggcaactcctctcactgaacaacactccgcacgcgatgtgccagacgtcgaggaggtcgtccacgaaggtgcactgcctcgtacctctattgaccgtccggccccggctccaccatctcaaggtaaattattctccagcagtctgatgcatggttccaattcctgatagtcgcagatcgttccgcgcctcctccacctcaccgagagtcaagacccgtcccgacagttccagtcgagccaccggcttcacctccgccagttcctgctggtaagtacccagatccggaagcaaattatacgacctgggcattaacgatgatatacaggtcgaccagctcctcctctaccacggcccacaactgccgacaagggcgaagagtctgatgatgaattgtcggtgcacacatctactctgtcgttgaataattcgcctgctccaccacccgtgcctacacatgcggttcatgaacatattgactctcgccgatcttcaatatacgaccctatgccctctacggcttcgacccccgcggctgaaaagagagctagtcgtctaccaccccctattccagtcaatccgccaatgccaccatcggcgcagggccgcgctccccctcccctgccttctgaccagcttcgtcgccgatctaccgtcgacagtcgcacgagtgcgttatctgctcctcgacaggctggagaagaagcggaaggagaggtgactgaatatgatggagactatgacacagatatcgcatcaggtgtgaaacacaaggatgctctgaaagcccacgagcgtgaatccagctttgacgagggtattttcaccgacgactattccatccagtctccgcgcagcccccaggaatcccggcatcatcacctacctcctcctccacccacggctcccagagcagttccgcctccaccgccaagccagccgccccggaatgcacgtgcgtctatcgacacacctaggggaccgccgccccctccgccggacagagagccaaacagcgatgatgatgttgaatatgaccctttcaactacgctgctccccgacatggtcttccggcgtctccacccgtcccagtcggtcgcccagggccgcctcctcctttcccaacacaagcggccgatgaatttgacgatctatatgatgcccctcctgtgcaaagcccagtaagagaaaggagcgataagcgcctttcactggcgcttccccaaggccaggcttcgggtttgccatccccgtccgcagctcgaacccagcgcgcatctgtggatattctaagaagtcagcccaatcttcgccgatctatggatgtttctcgcccatctattgaccaaggctacatcgccaccgatgttgatttcgccgcgtataccctctggtggactaaacccaagacaccgcctccagctttccagaaccgcactgatctgcttttcgaggtcgaggagactgcatctacgaaccgcagtggcaaaacgacagtctctaaggacgtctatattctattcatcgattactctcagacagtgttgaatgtccagttcgatcccaagaaccccaaggatgcttccttcgagcagcgccatgaacccccaccgctcccgtctcgccaggatcagctcgagcaggctcacattcagcttggaacccgaatctcggaagccgtcaactcggtccaaaactctaccgttggagacggcactccgttcggattggtccagcaccttctcagtcctctttccgacgcgctacttccggtggggacccgcgcttacggtgcctcggtttattcaaacctggccaatgcctccgtgtctcagaacgatgaaatccgcgctggtgacattgtcagcttccgcaatgcccgattccagggtcaccgcggtactatgcaccagaagtacagcgccgaggttggaagacccgaccacgtcggcatcgtggtcgattgggatggcacgaagaagaagatccgagcctgggagcaaggccgcgagagcaagaaggtcaaaatggagagctttaagctcaacgacctccgtagtggtgaatgcaaggtctggcgagtgatgccccgtagctgggtgggctgggaagccagtaagtaacaggatggtcttttttgttgctgtgattgcgctatgagcagacgaccctttcttttgtgtttttgcttgccccttctagattgggtgagatcatgtatgaatgaaaaggtacctcctttctcccctgtcttctatattcttctccctcttctcttgtcttttcctgtcctgctcccctctcgcgaatcatgtggacttggtgtggtaatgtgagatgggaaacggtggtccctatgtgatggagagttgagcgagcgtgcagcttttcgtttttttttttgttaatggtacatcttgcatgattctatcccccgcaaactatgagatactattctcgaatttctgatgtataagtggtcatgtcttgattcgtagataagttgccatgtagggaaattgtacatgctgcttaggccaacgatgacgacaatatatctccttaggggtcgtctccggtaccgagcacggaatagtcaagtttgtactttgcacgagtgaggataatgctcacctgcgttctagacctcgacgcccccgtctgaaataaattaagactaggattctagcgagctaacaaagttttctctaattaacggatcgaaattcgatgacggacaccaaacccaattgccgactccacctgagaccaattcatactccgtatgaccgtcagccgagttaaaacagtgcgtcaaacttggcctaacccacaaccaggcacaaacctacaatattgaatcgatcttgagcaccgtacggagcacagtggcgaggaatcaccaggtgagcaatgagcggatcagccgtggtcatacgactatggcagattctaactattgcttcatgaagaccgtcgagagagaccgggggctgccccggtcccggcaacccctcttcactaacagtggatgggggaggagggcctccaattataatgctcgtttcgttttttttttgttgagtttccaccggtttggtgttggcatgttcggtggagagtccctcgttggtggaagcccctggatctccggctagtactccggatattgatattcgcgatcggggtttctcgattccgagttgatcgtgggtttctaatattggattatcgggatctcgttggtttcgatgcattctggaagtatagcacgtagatagatgcaaggtgacaatatccagtggtactcgggagtgtagtgtatggctgataaccaggacttttgcccgggaattttgttttctctaaaaatgaaaccgaaaaattcggccacgagggattggccccgcggattgctccgttagttaagacccggttggcggatgctttccggtacgttatcgatgtctttcgatgctccggatactccgtacggagtgctccctagtattattggattgacggtgatgacatcaatgcaatcaaagctacggagtagatatcatatttatgatacatacataacttggaagtggttaacagcgctcgaaatgtacaagaaaaaacaagatcccgagttaaattagtatccagattcggactagtcaggggcactacaccaacttccctagggctaatgattcgaatcacgcctatcggaaggtggaaaagcttgtaggcggggctttcccaaacggctgtcaagcctaccggccaagacgcacctggggacgcgctaaagaagtttgctcctttttattttattctaggctttggggatgttcttcggttccacacagatcggatgaattcctaatatcaacagacccctatcataaatagttgctgggtcgagtggagatggacttggactctatcgtggcatctaccatggttcagctcttgctgctaacattgctgttgatccacaaccattactagttagttacatgtagtggtggtgatggtgtagaggatgtcggaaatccaacatacatagcctcatcagatgcagcgaatgccttgtcatgcacgctggtcctgcagagtcggaacattcatgagttcgttaggttttggcctatcttgtgtcattgttgtaccactggtaccttatattgtggctgaccattgtttttcaaagcaagtcatattttcaatatattgctctatgggcatagtgcagattaagatcgcgacgaactcccatgtatcttccaactttattgcatgttgtacggggtacgggagtatggcatgtctgattagtgggattactagagagttacaaccaatgaatttcccttgctgccggcttcctaagtaaggagtttcacattatacagtatgtatactgtgactcgatcctatttctcgattctgatatgagagattggacggatgaactactccggaccgtgaccaccttccacattcaaaatcctgctcccaaactgtgaaatgaagtaatggggcgacgatcttggtgtttcccgtgtccaggcccccgggaccccctagcgaatgggtgtttttcattgcttcattacggagtcccccgatgtcataagaacattggaaataacatcgcacacacaccaccgaattgcatgtttcgaaccagaattggccacatcgacatgtccagtctcgcagtcatcagggtggcgctcagccccaggttccacattccggaagcgagaccagaaggaagaggacagagggaaaaggaaagaagagggggatgtgatcctgaacattttatttttttatcttacgcaaggggggtgaaatggatgacggtaagtttgggcagtggctacctgatgttgagcggagtctacactggtcgcctaagtatccataccataccgtacctgcatcggaccatggatgcaggctcgggaagccccttggggcatggacagtgcaggcaatgcaggtctgctgaaacagtaaataaacagagaatatagatcgtatataacattctatatcgctaccgagagatccaaggaatataaccattagaataaagaacacgaacggtacttaattttgatccgctggtggacaccccatttgagacgatcatctagatcttatttttttttctcttggtaatatcgtatgccgctaagggccctggacagttacagttctggatccattccaaatctccccctcccatcgcattcttcgcgtcaatttccccagtcattctttcttttcgacctatttccttctcgacggactctgcagcatattgcgtcccgtttctctcatgctgtgatctgtcaatccccgctaattactctgattggtctggcacccggaccattcacggtacacggcgtgaactcggtattcctggcgcttcttctcttcaggggacgtctctctctccctgacctccatctgcacttgttgttgcacttgaaggtcatgccgctcatttcattctctggataaggacatccattgagtcactttgaccgcattgagccaacccgggacactgatcgtcgctgaagctactactacactctcggatttatcgacattcactcaacccaatcgtaaaattatcgaagcgcattcattcctttccaattacgaggtggcccctgagcacctcgagcatcccgatgatgaaccgattccgcaaacacaagaaggcgaaggaggccgcggaggaagaagcgacatcgccaggattcagcctaaaatcatcgaagaagaaggtggtcgaaccggaacccaaactagatttcgacctatcagccgcactcccgccgacagacaacttccgcaccagtctgctaatgcccaagttgtccgctcgatttagcatgctcaaggaacaggacgacccactctcaatgctaggcaaggctagtgatgatagcgttctatttcccaagcgcgcttcccgactcaatttgttcggtcacaaccccgccatgctgacagacattgacgaagtttgctccaatgacggtagccgaccatcctttgcacttgaccgcacttctttcgcttccggtggggacggctatggtacggacgacgatcgatcccaaacgggcagtatgatgagcagagcccgtcgcgccgagggcaataatctgtttggaggtcgccaaaagatttataagattccggtcagatcgccagcggcaacaacccccgatacgcccgacgctggtcgctggggaatgggaaagccggtctatgagcatgacttgaacctatctgcgtttcagcgattgcgtctcaaggagaaggaagagagagcggaggccgcggctgcccgggaatctggatatgccgcctcaactgcttcatctaacagccgactcacatactcctccaccgcatctggaccactgtcaacagtcccaacatcaactgtaggaacctccgccgacgagtcaccgttgaccacgtcccaagccccagcgacgggctatccgttccccgaaaccctccctgaggactctcgacccggtcctggccccatgtctggcccgcgcaatggctcggttcggagccgtcgtctctacggacaaggattgacacaggctgctcagagccagcagagctcgactttgaaccgcctagagagtctgagtcgccagcgtgctggcactccagatattccctctttgaaccgtaacttctccaaaagtgccaccaacctaagggaccacctgaagcttgcgattgtcgagccggcttctaccacaggcccgactagccctcctccatctgcaacatcatcaaagccacgaatgtccggagaagccgggttcaaagaccatctctcgcctagcacagcaacgtttggggctcctcccctgagccctcccacaagcgagaacaacgacgttccctcactgttggctgcctcaattaacccagatgatcatggaaaggctaccgctatgggcttgttccaccggcctgccactggttttgacgagcaggcattctcccgccgccaacttcaaatgcaccaaggccgagagaccccgccccctcgccgcgcatcgcctccgcgccgacctctaccggctgaacccgtgggccgtgctcggggactgtcgaagtctagctatcgttccacagcagagtcggcctcatctcactatagcatcgatccttcctccagcgttgaggcttctcccttcagacctggagtgaggactttctatgctaactcaagtgccagcgagtctggtgatgacggagagagaccttcctcgcgtgaactgtcatctctggctagcgagtacggtccgccgcttcagcagtccagtgtgggatctaacaagccatcaacttccacaaaggatcatctcgaaacgcttcccgaagtgagatactccgacctaggtgatcttagacctattgacgaggacggccttgacttcacaatttcttcccccgtagtcagcgataacacacccaaacgacctgactcaccaaccctggaaccagatcaaggctttggtggaatggggggactggttcgatctcacctacgccaggaaagtgagatgtcttctatcttccctcctccttcacctcgctcgtcagagcaccaaaatgacaaacattttcctaagaccgggaccccccagccaccgaacggtcttcctacgataacacaaacccgtgatgaaagtcggtcatcatcaagaacccgcccaggaacatcgagctcgcgatctccttctggacattctgtcgaaggtgcaggttctcgaaacagcgcagggtcatccgcacctggaactattgctgacacacctttatcgaacggcccgtcctggagggaggaattagaacttcatcatcgccgtcatggcagcaccgagacccaaagggaacgagaggaattcgccatcgagctggcagagagacgtagaaaggtgcaggagaagctgcgtagtgtcgctgagaacgaaagccgatccagcagccccaacccgggccggtcaaccccagaattctcccgggctggtaacgcatttgccatgttgaagcaaaagtctagtaaacaagctagcacaaagccggatcagaagaagttgtttggttatgttggtggcaactcgtctacgcctgctctctcagatggctcgtggcgcgaagaggagcgaccctcttttagcttcggccagcaccccaactccagctctccccacattggatcagagcgttcgatccgttctcgtatgccatctatcagccgcgacaacagctacgaagaatcacgcgagtcaagccgcagccgtggggagccnnnnnnnnnnnnnnnnnnnnnnnnnnnnnnnnnnnnnnnnnnnnnnnnnnnnnnnnnnnnnnnnnnnnnnnnnnnnnnnnnnnnnnnnnnnnnnnnnnnnnnnnnnnnnnnnnnnnnnnnnnnnnnnnnnnnnnnnnnnnnnnnnnnnnnnnnnnnnnnnnnnnnnnnnnnnnnnnnnnnnnnnnnnnnnnnnnnnnnnnnnnnnnnnnnnnnnncaagccgcagccgtggcgactcgcctttccgagaccgtgcaggctcggatgcatcaggccggtctaagagtcgaacaagacttcgggatgatcttcaaactgtgaacgagggtccaatcgagaaaggctctgagcctcctctgcccgtctcgcgtccgacatcgagtcgcccatcagcagaaatatccgaccctatgagtttcgaacgcacttcctctgttgcttcgggcagacaccgcagtagcagccgatccggcacaccaagctaccaatatgaacggcccttccagttctcgtccaacacgtcctcaatcatcggcgcctcgcctcgggccccacccgccgcgccgggctactctgccaatgcgactcctccgctgaacgaaatgccaacagacggctcgtctacatccctggcttcttcgtccagcggctcgcagaattctcaacgcgctttgggatctgcgtccctcaccaagcgccccgtgaacaaaaggctgatttccgagcctacctttctctcatccacagcaagtgtccctctcgtcggtctcccacccggatccgcgctgccttcacccgtcagcgcacccccagtgccacctatgaacccccgccgtcgccgtggaaccgccacccaaaccatcttgggtgcgttcaagatcgacaagaccgattcttcacgtgtctcgtccccggccccgagcgccgaggacgaacacagtgtcttcccagatgatgagaaacgcccgcgctctcgaaaccgtctccgcaagacttccagcgagggcggtaacctgaatgcgcgcgcgcgccaggaatccatggcggacatcccgccggctgttcctcaatatccgcctcccgctatccccgccgagggaggcatgttctaaacacaacgtcccttcccatcccatcctgtacacattcaccctcccttgacctaggctctctttattcctttgtcctctgtcttctcatttacctacatctactctacctatcactccctccaaaccccccttttccgggccttttcttctcttatctggactgtcttgtcatttctgctgttgacgactagataccactcggtgcatttgagcgtctcatgtctactttcgatcttttccttctttcctttgtgttatacacacctttgagctggattttcatcttccacgtatgtactttattttcgaattcatggatacactactcgatacactggatattatggtctcgtaagctctgttactcgtagcttcaggttgaacaaggctatattgcatactctctaacacgcctcattcaagccccggccactacacagtaaattggataatgtggacgtattcccgtagattcgattataggacgatcaagcattgatcttattgcgcgcgcttggaaagcatcttaaatggtatataattgcttttaatatagtatcatacattttcattgaaattagttcaagatctatccaccgccgtcttgaggtatcccaagaccctctcaacaagccacttccgcgcctcagcttggtcatcattactcaaagcatgagaagcattagggataacgccagtgtgcgtttgatcccaaatctgatatttgccatcatggtccgtagccttctgccacctcgccagcatcttgttcttatccacataatcaggaaccgactgatccttcccagagatcaataccatcagcttatgattcaacagtgcctgctcttgaatccgaccaaaggtagtcaaaaagtggtcatcgctgagatccgagctgaacagatcatcctcctgcggcgactgcggactctcaggactaaccagactcaagaatctgcgacagctaatcggcgtattggcaggataaatcatagaagtcaactccagaggaaggatagtatcatggggcttgccctcggcaacagccgccttggccagcgcctccatctcatcatataccgcacgtgccttctcaggcgtcgtatctccaatgccccacttcaacacgcagaagatagcctcgcggtccgaaacgggcgcttgcatgatcgcgccgtccagcacgggccgcttgatgtgttcgatctccgggtcgaaggccgggatcttggtgtgcgggtttggcttggagaggtagtgcagcacgcactggctgcccgtggaatggcccatcagggcgatcttgccgccgccgaatttgtcgcctttgtagcttttgatgtattccagacactgggcgatctcgtccgtgtcgcggtcgagatggccgaggccccaggattggtaggaggatgtgaggttgagggtgaagagggaccattcggtttgctgtagggagtgggcgagatcggccatgtaggatgttgttgcgaggccatcgccgagtccgccgacgaagaggagactgtgcggttggcggacggtgctggaggtggattcgaatgtgacgagggtttcggtctacatggtttcaattgttagttgtagtcccaattgttattgttgacagcggtgcgggaacatacgtagtggtgcaggataccgggaaggcctcctttgggccagaacttggacatgttggcgtgtgtgtgtgtaaatgtgtgtagtgggggtagtgtcagttgaagggaaaactattctaaaagctagagagggcgacctccgggacaggatcttttctttaatgagccaattgccgagatcgggctctatgtctctccggcatgacggaatgtggacaattttgtgtcggttagcttggaccgaataacgcgatccacaaggtgaacggtttcaggccatcttatcaatctgattataccgaggcaagccgagatattaggtaacaaatctcacatccatggaatgttcagtgccaaggtccaacgttggaagttaggggaaatgcgggaaactgcagactttttgaggaaattatatcgatgtcttgaatcaggtacatgtatttcaaggtacccgttcaggtaatactctgtattggaaaacaacgggctgttacgtattggatacggcgggatgtatttcgtcatcacggtaaatacagcaattcaagctcgattacgcctgttacggctagtaattatacaaagctttgcacgggaagtgagatggccaatgaaactccaccgttgaaacgacacatgcagactagtcggcactagcctgtataggcaggatcgacggatctgattagattgattggctgaaaacaggagaatctgattagattgcccctctttgaaaactctacccaacgtgcaggttcggccgaacgttcgtcagcatctgatcagcatgtgcatctcaacacaagacttttctgaaatgcttaggaagtcttggtcagccttgccaggctcattcgaagatctttgcctgaagaggttgtcgtcgtgtataatattattcattcggattcgaatgtagacattgtgcaaaaataagattaaagtatatgcgtagcttttatcagaccacgaaattaatatagacaagtggatggctactttgtggcgtttgcaagaaatccatttaaacttgtctacaagcgagccaagaaatcaacgtaaggaacgtgcgcgacagagtgaggcctttatcaaattttctttttaatattccacgcttattgcgcgaggtccaagcggatattgacttattattatgtactattgttcaatgtattcggatgattctatgctagtacattgcgagaagtgtacacgactggtacacgacacacatgtgcgtgtgatttttcaaggtgggtctcggaatgcaagaatatcgaaaatccccttcctcgttcttcgcttccatcgggcttttccgcttgacacgcacaatcgtggatcccctaagcaattggcctccgagacctcggagaaccattctttttcagtttggagtgccttgatgtgtttcagaataggacgatcatattcaggctgactgcaacatctgttattttaatttatgtcttgatggtgagcaatatcctaactggggtcttccgtaaccaatcttggcgtagcatttccttttttccctcgtttttcccttctttcctcttgtgtggagtctgtggacccgatacgtcctgtatcatacagtattgtatgcagctttgagatctgaaatcacatacgacatacacgtatgggtccaaaatgctcaggaaagatgaaacggccacatgcttcggctttcatactgccttccagaacgggcgtgaataatccactcaccccgcaatagccgatctcggtgatgatatgcaaaatacatgcagggcacattcaggatatcttcggagctttcaagccttgaggtggagctgatgcagaaccgtgtctagttggctatatagtgacacacttccgtcaaattaatccgcgcaaaggctcccgatctaacaatcaagctcccaatcccttcacataaactcgagggtaccaagaccagctgcgctggtcagccgtcaaaatgggcttcatacctctcgaagatgccaatattcgcaatgcgccaaatggaattgagaaagtgccaacagacgtcaatggcgactttagctcattccacattgcggatcttgcctctgaacaaatcatcactccgaccggcatgaaggaagagatcgtgctgttgtcctggctcattgtgttgttgcgcagccgggaagacagccaaatatcatacgactggtcctacaaatattccgcaaatggcgctgagcccgagtcagtgaacaaaatattgatgaatgaagtaatgaaaggattacaaagtaatgtgggagaagttgcgactgcgatctctcggaatatcaccgcgggagcgtccagtgacgcatcgctcgttttgagtaccagctctctttcgcgaacatcggaagaagccaaagatgaagtaagtgaacgattaaaaccatagccactgaattataactaaccgtaattgaaaagggtatgcttcatctcgaagttcggttcgataatgcccacctcgagatccgcccattgtggcacaccgagaacatgttgccgtacacagtgaagcaccatgtcgaggcacttgccgacactgtcagagtatgcctcggaaatcccgatgcgacaattgaacaatgtcttcgcccgactgaaagtgatctgaacgatatatgggggtggaaccacgaattgcctcccacctacagattttgtatgcaagatatggtcgctgaaagagctcgcgaatacccagacaaagtcgccattgattcctgggatggcagcttgacctatagccaaattgatcagtggtccacttccgtagcgtgctcgctcaaagaaatgggcgttgagctgcacgatgtcctccccgtgtgctttgagaaatccaggtggacgatcgtcgctgtgcttggagtgatgaaagcaggcgcaactcttgcgctcatggatccaacacttccgcttgcccgtcttcaaaacatggctgtacaggtcggcgcaaagtccatggtttcatcccgcatgcagtatgagctgtcgctggagatcatgcccactggaaaccacttcgtcgttgaagaagacgctttcacaaatccagcaaagtccccatcaatttccgacttacccgatgtaccatcctccgccctcatgtacatcatcttcacctctggcagcacgggcactccgaagggagtgaagatttcccaccaaacttacacgagcagtgcaatccctcgagcaaaggcagttggatacacgccagagtccagggtgcttgatttcgcatcctatgctttcgatgtcagcatcgacagtatgcttttaacactcggaaacggtggttgtctttgcattccatccgacgaggatcgactgaatgatatcaacgaagttatccgcaaaatgcgaattaactacgcaggcctgaccccctcagtgggccgaattttggacgcggatgtcatcgcatcgctcagcggcctcggtctcggaggtgaagctgtctcggcaagagacgccaaccactggggcaaagaaaccagaatcattattggttacggtccctgcgaatgcaccattggatgcacagtcaatgccagcgctgctaccggccgagattatctctccattggcccaggcaacggcgcagccatgtggattgccaacccgaatgaccacaacgagcttgtgccagtcggcgctgtgggcgagctgctcgttgagggaccgattgtcgggcagggctatctcaatgaccccgagaagactgctgcttctttcattaatgatccaccttggttggttgcaggccacaaaaactaccctggtcgtcggggccgtctgtacaagactggagatcttggaagatatgatcccgatggtcttggtggtatcgttttcgttggacgaaaggacactcaagtcaaactgcgcggacaacgtgtcgaattgggagaaatcgagagtcagctaaaggctgttctgccttcagaagctaatgtcattgctgaagtgattacccccaaggattatggaggtcagccaatgctcgtcgcgttcgttgccttccaaccaaagggacatggacaggccgagcttgccttggatgacatctcaagcgaattaagtagcgtattgacaaaggccaatgcggacgtggcgaagactttgccacgttacatggtgccaaccacatatatcccggttaatcttatgccggtgttgatttcaggcaaaactgatcgcaagcaactccgagcatttggtgcgacagttgatctgcgccagctagaccaaggagctgcaagcaccgcttcccgggaactgaatgagcttgagaagcgcctgcgacaggcctgggccgaaacactcaaactcgatgcagaagccattcgccccgatgataacttcttcgccctgggtggtgactccttggcagcgatgagactcgtgtctgtctgcagagcgcaagatctcgacctttctgtcatcagcactttcggaaaccctaccctctcggcgatggccactgtcgttcagccttgcagctctcatgtacaggaagatatcccggcattctctttaatctcccaatctgttgagagtgctcgcctcgaagcagcacaagcttgtggggtggatcaagaagacgtggaagatatctacctttgcacacccacacaggagtcactgttcaccttctcgctcaaatcgacaaaggcgtacgttgctcaaagagtcgcatgtattccgtcggatatcaccctggatgcttggaagaaggcctgggaagatgttgttgcagcaagccctatcctgcgatctcgtctggcaccgcttcaagacccaggtctccagcaaattgttgtgaaggaaggcatctcctggagatactccacagatctgaaccaatatctcgagaacgaccgaagcgagaagatgaaccttggacaaagtctggctcgatacggccttgtcagcaacgagaatgatgacaagcggtatatgatctggactgtccaccacgttctctacgacggatggtcagagccaatcgttctcaagcaggtcagcgatgccttgcagaaccgttctgtcgcgatcccgacacagatgcgggattttgtcaagtacgtacgcgatacagacgagactgccatgcatgacttctggcgacgggagttgaagggtgctgtcgggcctcagttcccccgcctgccctctcgtgactacatgcccactcccaattccatgatcgaacatcagatttccctcgagacagttgctggatcgcctttcacgatggccacattggtccgcggtgcatgggccctcgtcgcctcccaatacactggaagcgacgatgtcgtgtttggtgagacactcactggccgtgatatttcgctaccgggtgtggagagcatcgtcggaccactgatcgcaacaattcccattcgcatccaggtccgccgatccaactcagtcgaatcctacttgcagacagtacaacaaactatcgtggctcgcacaccctatcagcatatgggaatgcagaacatcagaaaggtcagccaagacgcgcagtatgcatgcgaagctggcaccggactggtcatccagcccgatcccgagtacgtgggtagcgagcttggatttgagcttggcgatgttgtccgcgaggcgcttcacttcaacccgtacccactcatggtggcctttggaatcaacaagggtggcctcagagtttccgccagtttcgatagcagcctgattgagagttcgcagatgcaacggattctcgcacagttggaaaccgcttgcgtgcagttgtctaagggtattgacaagcgcattgatgaaatctcttgccttcccgagactgaattgaatcaaatttggcaatggaaccagactcctcctcttttcgttgacgaaacctctggcaaccttcgcgcccatgcgagcaccaaacagggatcagtctatcctcgtactgtggttccttgggtttgtgatgctcgcaacccggatctgttgtcgcctattggcagtgttggagagctctggcttgagggagcctgcctttctggggaaacagtcgaatcacctgcctggcttgtggctggaagctctgaacacgctggccgatcaggaaaggtgcagcctacgggtgacatggtccagctcagagatgatggaagtctggtatttgttggccgcaaggagaatgttgtaccccttcaaggacacgcggtggatattgcagacctcgagtcgcatttcgcagctcacctcccatccggaactcgggcagctgcatcggtgttccagccgttgagagaaggcactcaaaaagcgtccgagcaagagctggctgtcttcatcgagaatcagccttctcaggaagacagtgtaagagtgatgccggcgaaatacgagatagtgggcgatgagacgactgtatgcgacactattcccgttacacttgctgtgtcattgaagaagctcgacaaatttatccgtgactcattgccatcctacatggccccatctgcgtacgtcgtggttgacaagttacccgctggactggagcaactcgaccacacctcactcaaccaattggcatcgaagattcctcgaaacgtcttcgaagatctccgtggaggcttcaaagaggcatggacaaagggcttagcgcagacaaccctatcgcccacagagaagatcctgcaatccgcttgggccaagatcctccgattgagtcccgagcagattgacgtcgatgacaacttcttccgccttggaggcgactctgtcttggcaatgaaattggtgtcaagtctccgcacacagggacacagcttatcagtggccgatatcttccaacacatgcgtcttggtgatgcagccaaggtgctgaaggtggaccaagcgaaggaagccgctccgctatacaagcctttctccgcgctgaacaatctggatgtcaagatgttcttggcctcaactgtccggcccaagcttgccaacccaggctggcccatcaaggatgtgttctcgatcacagattcgcaagcactcgatattagaggaactattggagcaccacgcacttccatccaatacaccatgctgtacttcgaccaaaatatcgatcgcgagaagttgattagcgcctgcaatgacctggtcaagacccacgatattctgcgcactgtcttcattgagcatgaatcgtccttccttcaagttgtccttgaagacggacatgtccccgtgatcatgcgccaggctgacaaggatattgagcaatacgtcaccgacctctgcacaacagacatcgagtcaaacttcgaacttggatcgccattcctcaagatcttccatgtccaaggcaccgacggaaagcactgtctcgtgctaggcctttcgcacgcccaatatgatggcgtctcactccccagactgcttcaagacctggagaccctatatgccggagacaaggttgtggactttgagccattcgcctcatacatggcacgagttaccgatggacgcctccaaactaaggcaatcagctactggggcaagctgctcaaggattcgacactgtctgtcctcgatggagcctcggcccagtccacagacaaatccatcttccacgagaaggccgtcgaagaattccagcccgtgccggagatcacgacggcgaacgtgctcactgcagcatgggcactggtactggcccgtcgtctgggcaaacccgatgtgacattcggcacggtcacctcaggccgaacgatcgacctagcaaacgtggagaatgtcatgggtccatgctaccaactcactcctgtcagagtgaagttcgagtcgcagtggacagcgatagatctattgcgctttgtgcagcagcagagtgccgagtctgcggcgcacgatttcctcgggttcgagaagatctcgaagctgtgcgcacactggtcatcggaggtacactcctttgactcgattgttcatcaccaggactgggatgatttcgatgatatgccatttgctggatcttcttgcaaggttgatatttccaacccacatggcgatgctgcttatcccttgaaggctgtctcgttcgtgcgcggtgggaagatgcatgttggatttgttggaagtgaaaaggatgtgacttttgtggatgccacgcttgatgagttagctgctgctgttcaggagttgtcgggctgtcgctctgatcccctggttcttggtgcctgaatatgatagatgatatatgatatttttgtaaagcagatagattgagatgatttgaaatttgattgaatgtttttcttatatttcacgtgtcttttctacaaacctaaaggacctagatactcaaacctttggtttatggcttcatatcgtgccttgtatctctttttttccattgcagtgggaatcctcaaattgtggccctattttccaggtagggagaaaatctcgaataatcccagagagaagagagcccagtcaccactcacagaatgaaaaggagcttacaggatgttgctacattaggagataagaatgtctactacggtctgagtgatctccatgcttgctagctgacctcgctggatggtgttgttgtgtcgcactcgtggccagactgcccatcgtgcatatccttcttcaatatatatcttttgaatacgaaaagatgccggccatttctactagtaatagatcataaaaacactggtaaaataataataataataataatagggatatatattaaacaagtactagaaatttaaatcggacatatacttttcaagtcgccactgtctggtgcatgacattcgcccggtaactgtcggaccgcaggagcaattcttcatgagagccagagtcagtgcatacaccaccatcgatcaagaaaatggtatcagccttccggatagtgtgaagacggtgagcaatggcgatgacagtgattccccgtgcggccttttccagaccatcctgcaagagcttctcggattcagcgtccaaagcactagtcgattcatcaagaatgagaagcttgggcttgcgaacgagagcacgagcgatggacaatctctgcttctggcctcccgagaactggttaccactcggtccacagagcgtctggtagccatttggcaatgcagcgataacatcgtggatgtttgcgagcttacaggcctcttgaatttcttcaagggtcactttgtggttgggtcgggcaccgagaccaacattgaactcaatgcttccttcgaagaggacgctctcttgaggcacaagagaaatccagtcacggaaggtgacatccgaggtcttggtcacgtcaactccgtcgattatgatagagccagattcgggtttgtacaggcgctcaaccagggagatgatggtcgatttaccggcaccactgggtccaacgagggcacagaacttgccggggcgaatatcaatgttcaagcccttcagaatcttcatgtccggccgggcagggtaagagaagtgaacatcgcgcatctgcacactcgaagccgtgctgcccgagttgtaggtgggtttctcttcagttgcctcgacatccatggtgtatggattgagccggccacccatcttgtccttgccgatctcaatcaggccaaggattctggacattgccgatcgcgcggcagaaagctcaggtgcgagtgcgaacatctgactccaaagcagggcactgactaggagagagaagacgacaatcaggaactgggtctgactgtagttgccgttgatgatctgcttggaaccccaccagtatgccagtgcatttaccatgttacctaggaagtaggtcatggcttgccagaaacttgcctgcacggtgaccataaatgtctccttgcggggtcctttcagggatcgtcggtaggtccttaaagtattctcttcaagagaaagagaggcgattgtcttgatagaggtaactgcttccacaccgatgtcgacagacttggtgtaagcgttttcatgacgctcctcgaatttgccgaggaccatgagctccattagaccagctccaagcagaaggggtacaagggccaggcagaccaaggcaattctccaggcaataatgtgggtcagaataatggcggcaatgaggttgacggtgatagagaacagggtgccaacgacagatccgctaataccggcaagggcattaccatctctggtaatataggacagaagtagagcaggcgaccggccgttagactgatgccactggagatcttgttcaaacagtgaccggaatgacaacactcgcaccttatagacgatcttctcagagacaaggccgaatcctccccagctgacgatatttgcaaagaactcgatgatcgcaagaacgaagaacatcagaccgtagaagttaccccgtgagctgatgctgtctgcagtgtgacaagggttgagacttccgaccgtgtttccgaaaatgacggcttcgccagagaaggctccgccaaccatgctggaaccgaaaagagcagcaaaaatgacaagcgtatggggcttgagagctggagcataacccttgcaaagaccccagacggatctgacggggccctgaaggtctctattttgttcctcttcctcatcggagtcaccggctggtgcttcagtggttgagacacgggtttcctttgtaggttcatggtcatgtgaaagaccgcccttttcattttccatgtcggtaatagaggtagcatcggacttgctgacgctctcaatgctggcagtggtatcagtcttggatccagccgcagctccgagagtctgcaatttaaccagctcagagtaaggcccattcgcagccatcaactcggcgtgagttccctcttccaagatatctcccttgtgcatacagacaatcttatccgcatttgtgatcgttgacagacgatgagcaatcgtgataacagttcgaccggttgagatgttgttgatagcccgttggatacgctgttcactgcgtgaatccagagcagctgtggcttcgtccaaaatgagaaccgcaggatccttgacaagggcacgcgcaagagagactcgttgcttctgaccaccactgatgagtcgaccactagagccaaccatcgtggcgtacccatactgcaatgcttcgataaagccatctgcatcggcaagcgcggcagcatgtcggaccaattgaacgatttcgacgatttctgggccccgtctctctgctgcggtcataagatcttcaccctctctgacttcggtggctagatcaccgaggtccgttgaaaggagtgccatcttcaggtgtgcatgggctggtttgcttgagttcatcaagccgtgtgcgatgttctccaaaagggatcggtcgagaagggaaggctcctgctgcacaagactgaggaatcctctcaagtcacgggtattgacatcgcggatattgtggccatcgaaagtgatctcacctcccgtggcatcatacaagcggataaccaaacctgcgatggtggactttccacttccagaaaggccaacaatggcagtgtgcttcttgggagcaatagagagattgatcttgttaaggacagtgatctcgggcctggaggggtaaatgaaagagacgtccttcaattcaaatccaccctccgcctcggtgaggcgaatgccctcatcggagtgtccatcaatcaaggatacacgatcaatatcgcttcgcagcttgtggtaacaggcaacagcctgtgtaaacaggtggataaaaggtgcaacttgactcagaagcagggtagctatcgttaatgttagtaaaatatttcacaccaagatatctattaaactgaccttcgaccaagacaaagataaccgtgaaaatagctccgacagtggctcccgcagactcgcggcgcactgctgcggcgatctgtttacttccttgccagaatgcaagaccgtttgcaccatatgagacgaaatacaagacaccggcttgaataccagtggcagacgcctttttcaatccttcggtttccgagtcctttaacgccttggagaacttctcctctagacgagcgttggcaccaaatgcatgcaccacaacaatgttgttcagcgcttcggaggcaatcgacgcagcggaagcagcataatccgacatgcgcccggtgtatttctcgatataataacttccaacaaatgacataatgaagtatgcggggatcaaggacagtagcatcgcggcaagaatagagtctttgataaatgccacgacgtatgcggtgacgaaaaaggagaaactcgagatacagattccgaccttctcagctgtaccggagcgaatggtttggatatcggtattgagtcgagaagcaacttctccggccggcaggttatcaaagaaagagggttcttgtcggagcaggttctggagatacttttcgcggagtcgctgcgccaggcgcgcaccggtcatcgtccagcatagtaggtgaaggtagattaaaacgaattgagcaatgcccaggtacacgatcagcagaattctgctattgatgtccgcttgatcgctggagtccccttgctcgccagcagcttcggcacaggtcaccgaattgaaatcatcgataagttgaccgaatacgataccaatgatggggaaagggacacccgatccaattgcagacgccaggccaacaaagagggttaccaattcgagtcgtgagggattggcagccacaagcagccgagggtagtctgcaaggttcccgaaacccatggtgactcgagaatggcgttcaacactgggattgtcgtttgagtgttgaagaagctaagttcttacaggcgatcaatttatcgctttgcagttttaaaagtggcgtcaccatgaaaattgcacccacttcttagcgtgagtccattcggcgaaactactttagctgggttgcgacaaagacccaaggaaagatgtatgccaagtgtaaagatggggattccaggggatttccggatgtttaacctgccgatttgattttttccactctgccgacatcggttttgacagttggatccgaagatgcaacccacaaggggggcacctgaagaatttcaattatacggacgggggttatcagatcaaaatgggggtttgagtaccgtggttacccttactgccgtccgtacgtgtaagtctgggtcaatacggctatactgtatctataaatcccaagtgtccgtattttacatccggaaaaaatacactatgtatttaataaaacaaagtggagagacggtaattaatacggtacctcaaactctgtcttagagctagcaggacgtcctattggctgatatcttgttaaatatccgaaaagcatattccatcagaatacgtgtagtataacacaatatcattattattcgaacgtacagaaagacaacaaagcccagtgggtcctgtcacatcatcctatctttttaaaaaagcccagaagattatctgattgattggggcaaagcggagtgcataacgcgtttctagggggaactgcctgaacaaggaagctcgaggtggagaacacgagctacccccacttgtctcggaaagatgatggaaatgaattaaaaataaaagaatatctcctgaaattttatacattgcacaatgttaagcttcgccgatcagagtcaagtatgagtcaagaaagctcaagcaaatttacaatttcgcattccacgcggcgcgatcagcggattctaaaggtcgctcacgtccgtcccagaatagtggacacaactggaaccatttttcgcgactgcaaatcgaatggaccgatcgcttatggccgagatcgacgtacttgccaattgtgagtccttgcgcgttctcgtaggacaagatggtcgccccggtggccttgggctcaccgacagcattagcggtcctgggatcgtccaagaaaacatagtggatacagctcgagtaccaggcatttacgcggtgtgcacctcggaagctggcatcgccgacaagagagtgacggcctcggtcatagtctccagcatcgtagtaggcgccatagtgatcctcctgtagacaaggtgttagtgtcaatgccagcctaaagcttgacggagtcgggggatttacctttgaccagtacaactcataatacgaaaagcgggtatcatcgaagcgtccgaacaagcacagaacatggggatcgaagtgcagtttgcgcagatactcggtgtgctgttcaatagttccagtctcattccagcctgcggcaacacgcgggtcattttgccacttgttgaacagctggacgtgttccgcattttgccagtcaacgacttcgagcgagaagtgctcgttgatctcagggatgtagcgactgtaggcaattgatccggggaacggcttagggcggcgagtcgggtggcgggtatatacaggctcctcggggaacttgtttgtcatttggtagttctccggcatgatgggatactgagacaagggctcccgcatggggccgtctgtgccatctcccaccacccagataggacgagggcccaatggagaagcagcaccctgccagaaggcgcttcggagaatcagcaaatcatcgaattgcagagccttgttttctctgtcccgcaggttccgcgggtggtcgattgccaacccggtggtaagaagctcattgcggatgacttcttgccctgtgccggacagggtcagtctgaagtactcgattgttgggtgaccaagataaatggcgtgaacaacgttccaaatttggcccaaagaaggggtgctgttccctgaccactggaaaacagtctggggactgcgacgcgcgcgaccccagggactgttatctgagataggtggttgctcggctttgggaatgaatgtcaagtcaagccatgagagcgagtctgagtgtagctgttcaggcaaaggccggccctttgcgggctgctcgtcaagtgtcaaggtgcgcgtagccggtgtcgatccattgactgtgttcacacgatatgcggtcaggtaagggtgtggtagcttgaccaaaggatactggtgtgatttggaggccattgtcgtagtttctcgatcgtcaaaggtagggatcaagaattccgaaggagttggagtgtcggtgtaagaaaaaaaaaaaaagagagctccccgcgctgcgcaatcagattatatgtatggagtaggtgagaccctcaaacggctgaagaatatcaattaaggagatagtaaccgaggccgaattctctcacatatgtaacgaatggtttcgggatacacgagcctgaatttatcaccctatggggctgttattttcaaacatgtacaataatatatctgtacgttgtacggagataataccgatgtcgtcttgttatggagccaactcccgaggttccgtggaagctttctgcgcccgagctctacgaatgacaatacataatccgtagcccagcccaagagaaaatataaagtcgaagtctaaggttgaattagtcacaatactgtgcatattctgcttcacaattcatcatgtcgttacgatcagggcccttgaatcatgagaatttctatatctctttcccgcatgagcggattgtccaggtcacaatcaatagaccggacaagctaaattgcatcgacaagaagactagtcgagagattgccaagatctgggagcagttcgatgaagatgaaagcttatgggtcgccatcatcaccggtgttgggagagccttctgcacaggcgcagatctaggaggtgggtttcttctttctatcacctgaactatcgactgacggaatcgagcagagtggaacgcaatgaacaaggcaggcgtcgtcaatgacatgtccgctcctggcctggccggattgcctcgccggaccggcaagaaaccgatcatcgccgcagtgaacggcctctgcatgggcggagggttcgagatggtggcgaattgcgatcttatcttagcctcatcatcggccattttctcccttcccgaagtgaagcgaggcatcgtgccagtagccggatgtttaccgcgattgacccgcactattggcctacaacgcaccatggatctcgtgcttactggcaggaacgtgagcgccaccacgctacatgactggggtcttatcagtcaagtggtggagccaccagccgacgttgtccgagcagcaattgaagttgctgaggtcatgtgcaagaatagccctgattccctcattgttggccgtctaggtgttcgaatgagctgggaagctggcagcgtggaggatactgtaacagatctcgcggatcactggtatcctcggttggttgggggtcctaactttgccgaaggcatccaggcttttgtggagaaacgatcaccaagctggaagaattcaaaactgtgagaggaaaaaagtccacccacactacaccgtaatcagatttggtggcgcaaccattttccacagtccgatggcggtgccatggttgatagtggagtgtgtacttatctgatttaactgtaacgcgacgtatttaattaatttcttttttttggaatgtttgggtcaaaataaactgcacgtggtaagcaccttaaaccagaggaagagggatgtatgcattgaagaagatatgtaggaaataactaaagatattttcatagatctgctattaattccaagagtcttggaaatcgtggaaatctcatgcgtgtttcatcgaactccgtttaataccatctcactgtattaaataccgctagtacctagttagtacggagtacatatattgttctccgtactatgtacccactgataccttctacattgtatgatgagtacatatgaccgggtgaatccgcacggatctcgcgtctttagtaagtagcttttagtgctgacccatgacgccccaaacacattgacccattattgtcattccttattaatataggatttttttcttatatctttttccggctgtcggcgtgacaattccattctgcatgccaagcaatgccaaggtatggattaccgcaacaggaagcttccgcgaggtacttgagcttcaagcagttacatccccggttaacattgccctcgcttcgtctctccggtatgagattcatcattcatgcaatcttattagcttctacctttggaaagtcccatcatggctgacgccgtcagtggggtgactagacatggcctgcatacgaccatacgcaaagaagccctagggaggagaggagggaaaaaatacagtttgttcgattattactccgtagcgaatgaacgctaagacatcgccaagacatttcctactggttcatttcacacggcgtgcattagccttccaagattgtaccaatccgccgagttcggtatttttttttaagcgctggatctggagcaccaataaccagggattatatttgctataagggcaaggattcccatgcgcttttgggttcctccaacctactttttatatttcctgatctccagatcaacatgggtgtttccaggttccgatctgccttccggcgatcatcgacccaggactctgttactcaaatccctgtgaccactgatggcgatgaaaagagcaaaatccctaccgaccccgttgctgtacccaacagcgcggaccccgaagttcccactcaagatgcacagcaaggtgtcagggatgtcgaggctgtgactttgagttggacgaggaccatgctgattgcagtctttgcaaagtaagcttttgttccctcgcctcgacgggcgatcgacccgtaaaaaccagcttatttactaacgtgaatcttcaatagcatctggttcttgtacttcgtcaatgctatgcaatcctcgattaactacagtttgctcagctatgtcaccagtgactttgagagtcattccctcctgaatgtcatctacattgttgcagacgccatgacagcctcagtgtacatccccactgccaagatcatggacgtttggggccgtgcagagggtttcctggtcatgaccgtttttgctacgcttggtctaattctcatggctgtatgccacaaccttcccacattctgcgcggcctacgtcttctacagcattggattcggatgtatgacatactgtgtcgatgtcatcaccgccgacatttccaagctcaagaatcgaggtttggcttacgctttcacctcctcgccatacatcatcacagccttcgctggtcccaaggccgccgagggcttctacgaagacattagctggcgatgggcctttggtgcattctccatcatcttccctattgttgcctcccctctttacttcatcttgaagagcaacctcaagaaggcccagaagaacggtcttctagtcccggagcctagcggccggaattggtggcaaagcatttggcactataccaaagagttcgattgtgagtgaagagcttttcaaagcattggaaaattgggaatactgacttgaatagtgcttggtgttttggtgttctctaccggccttacaatcttcctccttccgttcagcattgcaacgtacgcccctaagggctgggcatcaggctacatcattgctatgatcgtcatcggatttgttatgcttggcctcttccttgtttgggagttccgctttgctccgacaccaatgttcaacttcagactgttgaccgatcgaaccatcattggtgcatgcttgctcgacgcgacataccagctctcttactactgctggaacaactactatacatcctttttgcaggtagtcaacgatctcaccatctccgaggccggttatgttagcaacactttcgacgttgtctccggcttcctcttgcttggagtcggtttcattattcgcaagactggtcgctttaagtggactctctacattggtgtcccgctttacatcttcgcccagggattgatgatctatttccgccagcccgaccaatctgtcggttatcttgtgatgtgtcagattttcatctccattggtggatctgtcttcatcattgtcgagcagcttgccatcttagctgccgccgatcaccagcacgtcgcaactgtcctcgcccttctgaacgtcgtcggtaccgtgggtgatgctgccggttctaccatttgtgccgcaatctggaccaacaccttctacaaagcccttgaggcgaggcttcctgcctctgcgataggagacatcgatttgatctacgaggatattacccagcagctgtcctatcccgtcggaacccccgcgagaagggctattcaatcagcctatgcctattctcagacacgaatgcttgctgttggcaccggtctcatgggtctttgcatcatctgggccatcatgatccgcgacattgacctcaagaaggttgctcaggtcaagggtgtcgtcttctaaggtgtttcccttcttctttggagataattttcgacaatgataatgttgatgatccatttcccattatatccaaaccacgactagctgctcccaggcagttatcaaccttcgctttttgtaccttactatttaatcatatcaacatgacggtctgaatgcagagtgttatgactatccgaaacaacgtttctattcttgtaaatacttggcaatgatattgccccgagttttccgcgacctgtagctcgcttggtgtttgtttccgtttaccgggagagccgcggtatggtatgatatggtttggtatgtaataaaataaaattggcactttaaataagttatgcaaatataccgctagtaagtatgtaagtaatctatgtatcaaagtatgaaacaaaaactgtctgcatgtgctttcaagtgaatcttgtgaaattcgagcaatacacaaccataattatgttgagtagcagcttgcagagcccggtgtcatctgacagatccacgtatgactaaagtcatccattcccgaggtccatggtggaaccagggaatatgtaaaaagatctgataagtttcttttccaacgcccttgccgtttttgtacggcactacccctttcctttcggctcaaaccaccctgctgagacgtggctgaggacctcgaaagttacctatcatttcaattagcgaagtaataatagcagctgggattagattgatatcttgggaacatttctcttacaacatgcggagtacaagccgaagttctaccacgttgctaagtgggtatggccgcgttctgaggcgcagccggatgttcggttacaatcttcctggaaatattccgaatggtatggaatctgatgattttatctgatcatctgattagattgggctactggttcgggttctcttggcacttttatctgatcccaaggcgttcggtaggcacgaccgccaagaagcagcccatggtcttctgtggatgtccgggttcggcggacttcatctcgcactatttccctcccattacgtacttcaaaagtagcaacctagtggcgtggccttgactgcttgacagaaaaccttgccaaatgactcacggcttgaatcccaaaggtgtgacatgaggtgcaagtgtgaccaagacttgagggcttcgaggtcacgtgtgacagccacatggtacatcatctagagagagaaagactgcatacccaacgcaggttggcaaacaagtccattaaacctccacttcttcccatatcttgtgtcctttctcccgttttgggattttccagaatggccctgttggaaggtcagatcacatgaccttcattgttcgctcctgctacatagtcttctacaagccttagatagttctttctccacgcagctgagtttttcagtaatgatcaagatgcgctcctccacgccatgaacctttccccagctgagacagttatcatataattattacatgacaccttatgcaagaagcctctatagtatattgcatggatgcagcattaactacctaaatttattcccttcttactcggaaaaccccaccgatggccacatcaattcatttgtggaatatgaaagtttgatccgcgagatgtaggatttgtaaagttagatgggcctacttaagtctgacatttctctgcctagccttcacgatctacctatactgattggaatcaacttgtttcgagcaaagtcgaccgtgcctagcctcagcgatgccaacctgtcaggattttagagcctaaagacaacatcgggtagtatacaaagacctatctgtattcgagattgaagcagctcgatgctaaagaacaagatccaggagggaaaaataagcactatccgctcctcttgtccttctcccttctcaacccgaaatcaccacgtacgactcatttataacgccgtgaaggaaacctgcctcggcatcagatcacaaatttgttcatcgcaatcaacaagtaggatcctttcaacaagcatcctatcaaagcaagttctcctctactaccaacaaggggatcgctttcagccggctgactgatcgcccattttccagaaattacaacaatgacctagctcagagttactgagtttgtgactcccgcgttaggattcgcacattccgtctcgaaatccgcaatggacatcaccctacagtctggggaatagagacatacgaatcaatcaacgaatctccgactacaaagccagatggccggggacattttctatgttgaaattagtataagggcaaaccatgacagttgatggaatccgagatctttcagtcctcccaactgtttgacgagacgctcgtcccgctgccaacctgttggatacccggaaggcagtcacccatatgggtccagatcaggagatagctccgctctcctcctcttctctctcttctgctcccgtgcactttattttggtcgaatcgatactggttgttctcctcatcgcagatacaatgtagatcgatcgccattacaaccctatatactatgaggcgtggtcaaacgtctgggccctaggtgacggcgatggaaaggactgcgagacccaatataaacagcgcagcggcgacccccgctagagaatgaatgagcagtcttcatttcctagtgtcggggacccttgtagtggtggttgtcttggccttggcttgggtctgcgtggtgagacggtaggaaagtgcagttggggtatcggggatgaatttgatctcacagatcctgctgcccctgatctgtaagtggggtgggtagtaaaaaggacaaaggtgaaagtcagtttagtcaaatttcgagtttgaagtggaatcaatcgcaaatcggaagtgaaattcaaccgtaaatagtagaccatgtgtgttaaaaaggtatagagtagggttgggaaagatagggcagctcagtgacaaaaacatggccgttcatgttcaagtatccagtgtcattcataatattcttccattttggtatctatgtcataaaacaaaaaggaacgtgtcctttctatacatgtagcatctctatcgaccatttctcgtacgaaaaaagcttactgcttatcggggaagccgaagtcgacaccgaagggagggtagacaaagcgctggagcttgccctcagcctggagaccatcactgtacttgcgaagggtagccaggtcctcagcgtccaagaagatcaagtcggcacgattagcctcaatgcgggcaggggtgacggacttggccaggactgaggagccacgggcgactagggagaaatcagttagtacgctatattcggtccagtgggtaaaggctagagatacttactgtgccagctgagcaaaacagtagccggagtaactccgcgcttgtgggcgacggccatgatgggctcagcgctgaatagcgggctgccggtactgccaagtgggctgtaagcggtgatgtggatgccagtcttgttgcagaagtcgacaatctcctgctgtgggagcaaggggtggttctcgatctggttgacagcgggaacaatagtggcctgggccaggagttcctcaaggaacttgagactatagtttgagacaccgatggccctggccttgccagtgccgatgagcttctccatatccttgtatgtagtcacatgggagtggctgtggataatgtcccgtgagccatcagcgagcttggggaagatgttgtggtttcctgtgatggaagtcagcgccgcgaatctgcatatttgaagaaattcaactcacccttggggttcattgccagaggccagtgcatcagatagaggtcgacatagtcaagtccgaggtctttcagactctgctcaagaccctcctcaacacgagcgtggaaagagcaccacagcttagtggtcacgaagagatcctcgcgcttgacaaagccggcgtcaatggcctctttgatgccctggccgacttcgttttcgttgccgtagcaaagcgcggcatcaatgtgacggtagccgaccttgatggcgtggaatacggcgcgcgcaacctcgccgggctgggattgccatgttcccaggccgagtgccgggatctcggctccagtattgagcttgaaacgggtatcgcaggcagccattgtggatttatcggggtatcaagagagaaggaagattatttacacagaataagggaatatgaacaaattgaagtagaaatggtcaagaaaagctctggggaaaggcgggggtttacaaaggataacaaccccacacggctatcggggttattccgttcctccaaggtcggccttttttccatcaatcacctcgaccatcttttgggatcttcgatgtgcttggaattttctactgggagagttctatattttttcgatcgacctcgaggagaatgattttccccacacaataaccgtcagaccaggatccaggagaacaagttagcagatctacggaaaccgtcttccagttcgacagattcctctccgcttgacatcacagccactccacatggttggcctgtggtcgtggggtaattgtggctgccaatcatcgtcgcccttttggagagcaacccagatctccatcggcgcggaagccagaatccgtgatgtttgatttttcgtcctacgtgcgagtacatcgatgtcatggcaaatcaggcaaatgaggcaaatggatatggggagagccctcacaccactgctgatatcggaaatctacacgcgatattttgcacatcggattttcctggccttaaccctatatatacactggatctcctagtgtctatccttcttttaaccccagactttcctgattgttaattgcaattcatttggcaatctgaaacttcttatatattctaccaagaaacactacttcatccaacacagtcgaaatggcacctgtcgccatctccccacaggcctcccctgtcttcaagaagcgggatggccacgcactggaagagctctcggacgctatcgacgagatcaacgttctcaaggacatgaagaagcgtgaggctgaaaagaaagtggctgaagagaagggtctatatgacgagtccgagttcgacaaggagaaggacaagaccaacttccgccagtacgaggatgccagcgaccgagtcaagaacttctacaaagagcagcacaccaagcagaccgtcgcctacaacctgaaagcccgccacgacttccacagcaagactcgtgccgagatgaccgtctgggaagccatggagaagcttaacaccctgatcgatgagtccgaccccgacaccagcctttcccagatcgaccacctcctgcagtctgctgaggccattcgccgcgacggcaagccccgctggatgcagctgaccggtctgattcacgacctgggcaagctcctcttcttcttcgatgccgaaggccaatgggacgttgtcggcgataccttccccgtcggctgtggcttcgacgataaaatcgtctacggccgcgactcgttccgcgataacgaggacttcggccacaagatctacgataccaagtttggtatctacacacccggctgcggcctcgacaatgtcatgctgtcctggggccacgatgagtacctctaccatctcgctaaggagcagtcgacccttcccgatgaggcactcgctatgatccgctatcactctttctatccctggcacagcgcaggtgcgtaccacgagttgatgaatgagcacgaccgtgatatgctccgtgctgtcaaggctttcaacccttatgacttgtacagcaagagtgatggaattcccagtgttgaggagttgaaggtatgttttttcgcttctactgatgatctgtgaattcgaggctaacttgtttctttctagccgtactacctggaactcatcgatgagtacttccccaccaaggtcctgaagtggtagacgtctgcgacttgctctcctcgcgtctttattccacaaatttttcatgattccccatttttgcactagttctatgaaaatagctacgatacttgccatcacattcaattagcgttaaaaaccatactttgtcaatcgttccaagcaatcaaacccagaaattacctgaataaattgatagagacgaaattaatcaactcttcaacactatttttcacacttcaaagtagtcaagcttcatagtctagcgctcagctttctcaactctaataatctcacattacaccacattacaccacatacaacttacattcgtcaggacctctttgaggttacggagatgtgaagatatcaaggatcgctactggtaaaggacaactcacttactgcaattacacaatttcccttcgatattaccatatctagagttagaagagtctactttggaccaaaacacaagatcgcatcgatatgtaagtcatgtcatcttcatttggaagggtatgtataagcgttgaacgtatatagggtatattttaaaatccccagggcacatcacaaattatttacagactagccaactgcgaccgtttcccatcctcatcgaagtaaatcttcttctctgtaaccatggactcctgcagcgcagcaccaatgcgaacagccttgacagcattctcaagttcaagaggcagtgccgtgttatcaagacagcaagcagtgaactcattggcctcggtaacaaacgcatactcgaagcgatcatagtagttctgggggatctccctccggacgccggtctcatcgtagatattaacgtggttcattgcaggctggttgttaatcgccagctttcccttggtgccgataatctcagtgacatcctcctggccagcggccatcatgcgggaagcatagaagtaggcaatacggccatcgtagaactcgaccaagccgacggcgttgtcgcggtcgttgtgcttgcgcaagtcgggctcgacggctgtgttgccaatcgccgacactgacttcactttgcagtcgttgccgaagaaccaaagtgtgaggtcaatgtcgtggatggagcagtcgacgaagatgccgccggagaactcggcgtatgcgacaaagaacccgctgggatcgagcttgtcgcaggtctgactgcggagtacggatgcagtgccgattgctcctgcctgcatcttctggtacgcgtcgcggtaggacttgtcgaagcgtcgggagaagccgcacatcaccttgagctctggcttcttggctgctgcgtcgacgacggtttgagactgtataagaggcgggttgttagtacttggtttcaatggttgattctttgtatttggtagactcattgaggttgagctggattcaaaatacaactgacttaccacttcgggacttgtggagataggcttctcgcaaagcgtgtgcttgcctgcttcaattgccttgattgcttgctcggcatgcacagcagttgccgatgcgaccaccacggcaaccagaccttcatgcttgagcatgtcgtcgtagttctggtacagggttacgccaaagggctcgaggtggattttggcccattcgagttcgacggggtcgggggagctggcagccacaagctcagctcggggagtacgctccaggaagttcagggcatggcgcttgcccatacggcctagaccggcacagccgatcttcaatctttgggtagccattgtatataaaatgtaaaggtcaaagaaaggatatcaagaagaaataaaatcaatagctaatagagagggaattctacaactgggcgacttcaagttataaggccgaaactaaatgcggaggtcagtctccgacaactccgcaaaacgtggggtcggaaagtgaattccaccaccgacgaagtcctaaaaaaggacctcgggacataaaaaaaaggctatcaactcgtgaattcactgccgtcggctttcttcgattcccgtcgcaatcttcgcttcgcaatatccactggatccgcaaatccatcacctctcagccaggtcaaagccttgcgtagtcccccaccctgcacggcttcagggttcccctcaaggattgaccccataagcgcccaggacagaacaaacaacaatagttccccgcccttgcggcccttccatagtccacgcttgaccccggtcttgtacgccgaatcaacagcgacccggaagaaccagaggaatgtgctgcgactgtttcccaggaacaagaatggcagaccgcccagtgccccactaaggaagaatcgcttggtaggaagcgttgtgcggggcaagttgtggttcaggagacagacactaccccaggctgagccaattgcagcagagataaccgctgtcatggtgataatacgcttcgaaatagtattcactgacgaaataggctgaagcagaatactcttgaatttggggattgaaagcgccagagtgatggtcgttaagaatcgcgcaagcggcggcacggagaggagaatgtggtgcaagaacgccgtgctacagttcgggagcttagggtgcaagagagcgcatgatagacttgtgattgcagggtgtgctggtccagtgattggagagatggaagctactgatgacggcaaggtgttgagatcaccagggtgtagaattggagaaacgaatgccctgtgtcatattagcgactatactcctgaacacaatcaacttcaaacatacggccagcggagatcagcaatggaggcaagagagttcacaatctcttctttctcgggccaggcgatgttgaccggaagcgactccggtcggccttgaatgtagctcggcgagagcctaaaaatgacttttccaaaccactatggcatcattttagcgaccgtgactcaagtaaaggaattccgaccacaaacattaggcgtagtctcacgatcaaacacgaaagcatggaagagctgggcaaacgagatcggcatcaacagccagctgccgaaccaccacgggcgcctatccagccagcctttcgagtccaggacattgaacaagaactccaagcttctggtgcctgtgtaaatcgccgcagtcaatcggagctggtcctgcggacagatgcctagcgcgaaaccagccagacttgcgccgatcgctggcgcaaagcgcgaggtcagcgcctgcgagacatacgggttgcgctctctgaatggctttgcatcgtcggtgcggaggttcgctcgcaatcggacgaggaagcggtagaggaggcgatggataagaaggagaagagagagagagatggagagacggaatttgggagatcggaagaggggcgttcgggtctttttcctgttggttggagcgactgttagtgcatgcatgttcctaaaagaggcatctgcgtagattaaatcgatcttactgtgaagcgccttggaaccgagtaatcaacagatccgccaacttcaacgcgattccggagccgacaaagactcgcagcgatgagcgaatagcggcttcactgtgtcgattctttgggcgagcgatgacatcgtagcgagatggagatgggagcttgttttggatggtaggggcgcgtctgaccactgattcatggaggaatcggtattctttggcgctgagacatacgcggaggacgtcgcgtaaggcgcgaggtggaaggtccagcgcatcccctgggactggagggttgtccgcagacatgttgttgttgatgccaagttagagcatcatcaggtgaagtccggggctgagaaggtcgagtggtccaatgcggagaagccgacctcggcaattcttacccgttggtcttgccatgacatttcagtattctgtcgatatcacgggttgtagccttactcaccatggaagctattgggtatcttggggatttcagaggccctgactacccagtcacattttgtttgtttctctcgtgtcatctaccgcgagaatggcttttccgcatacagtatctttccgacggggaggtgaagagcgaatttttataacaacacgactttcattcccacagacactatttgaatggacggtataacgagagtatcgggaaagcgaagccacaggacgatatgaaggtcctacaggacctgcacttctggctaggagacatggctgacgcatctcagctttgcctcgagcggatccttgaggccagaatcatcatgaagcttttatgtttctcatccttgttgctataacactaaggctaacaagatactatattcctttttctaggatgaatctgtccgatacgctatatcccaccatacatgttatgttgatgcgaaattacagtataactgaggtccggctcaacacttagatgccaccctgaattgagaaccggcataaaggcatttttcacctttgcccaagagatctgcctcgatatccatgagccggttgtacttagcaactctctcaccccggcagggggccccagatttcagatggcccgtccttaagcccacgaccaaatctgcaatgaaatcatcggtcgtctcaccagatcggtgagacacaaaaacactccagtcaaagctgtaggccaagttcgccctatgaataattagaactttatctctgggggaattgtaggggaaacctacgcctcaattgcttcggagatggtgcctatttggttgattttgagcagcatcgaattgcacgccctcttttcgttggcctcctgcacatatttcgtattggtaaccagcaaatcatccccaaccagttcaactggacattccttgttgaattcggtccaactgtcccaatcggtttcggcgaacggatcttcaagtaaaacgatcggataattttgcaacaatgagcgatacaggtctgtaagctgttttgagctttgcaagttcggtttgtcgtctttgaacccaatatcgtagttcccatccttgaagaattcgcttgatgcaggatcaatggcgaattttattctgccgctatatccagcaagagagacggcttgaaccaagaggtctagtgcctcatgaggctgggagatcggtggtgcaaaccctccttcgtctccaataccggtagcttgagagtatcagtaatggctgcgtaggatccatagtgaaaggcgcactaaccagatgttccatacttctcgacgatgaccttcttcaacttctggtaaacctcgcagcccatttgtactgcttccgtgaaagatgatgctccaacaggagcaatcatagtctcttgaaaagccatcttgttgcccgaatgcacacctccatttaggacattgaagaacggcactggcatgacgaatggttttttcgctccagactcacgccgaaggaactcgtacaatggaatcccctgatatatatcagccatcatgtcgaatcgtcaaccttaattatagcttacagcatgggctgcacccgctctggcacatgccatgctggcgcccaaaatggcattcgcgccgagcttcgacttatttttcgtaccgtccagatgcttaagaaggcaatcaatcatcctctggtctgtatcaaccttgagcccgctctgtactagagcgggaccaatgaccagtcggatgttcgaaacagctttctggacgccctggccgccatatgcagaattatccccatctcgcagctcaatggcttcattcgcacctgtagatgcaccagacggaacgatggctcgaaaggtacctgcatcggtgtaagaaccgagtttagctattgttggtgctctcttacctctgtccgtagtgagatcaacttgaacagttgggtgtccccgcgaatccaagcgctgggcagcttggaccgacctgatcatcgtgaattcgaaatgatgtagcgtggtgagttgatgggttcaaagcttagatgaccatcgcatgagaatgttttgttcttgctattcatcatccaggtacagtaaatttcacaatggcaaggggtgacgtagagtaactataaattaactgtgacaggtgatgatgtcaagcggatggcggttgattctcatagccagatctatagaccaacacttttctttattgtacgcttctgactccaatttactctcgggcaatctgagcctatcgcgatggctcattgtaaaataacttggtaagcaggatatggttgtgattattgtagttactagacagatccatagtatatatactgttcgagcggaaagttttgccgcgcctttcgaatccattacgacttcaagatgttcatttgaagcaagctgcattgcagttttgtccaaattcttcgcaggattgaggtctactgttttctggaagttgtccccaaagatcagctttataatacataaatttccgaaacgagctgtcgctatccggggtatctccttcttgtttgttccgatggtttatatcaaatcgattacccaactgcagtaagctcaccacaaagcagataatctccttcggtccttctactacacaactcggatagagcaactcgaacaccgcatcggtatcctatcgcgcttagcgaaaggagtgtatgcccataatcaagtacgatatgcttgaacagaatctgtgctcaggtcaggggtaactagataaatgcatacctaaatactccgtgcctatggagtccccctaggcatctttatttatgtatactaatacattgttgtttcactgcatatctagatatggcaccaatcaaacaaaagaccgcatgccaaattaaagagtggatttttgtctcagcgccacaaaatctctcgcgataagtcttcatgcacggagtatttggctagccctaaggagtacatcgagaaattcctcaaatcaagtgcttggcgtgaaacacaagcttgacggaactccacatggcttcccaggtatcaattccatatcgcgattggacaataaatattgcagcccagactgaaaccccatgtctcattccgtttacccgaaaatattccgggaattaattattccagcaatgattgttttcagcggggccgtacgtagtagattcggtggagctaaatgtttcggagagttgtcgtagccctaatagatgaatacaacggagcacctaacaattaccatgcatccatggatctcatggctctccaatgagtggtccggctggaaacaggggtcaacaccatgacagatggtgatgttcccgtttcataaggatactagcgcaggggctataaggaggatactgtgcaggccaagcatttaaatatcaaagccaagctcgatggaatagcttattcaaacccatccattcattcttacttcatttcattcttcattctattcggctagttccgaacatttacactctctttacttgtctgttgatcggacatttacttcaaaatgcgtacatctttcgtttccatgctggccctcggcgccgccgttgtgtctgctgccccagctcctactagtgtttccgaactggttgagcgctcgtcctcgacttgcacctttacctcagccgccagcgccattgctagcaagaaggcttgttccaccattgtgctggataacatcgaagtccctgctggcgtgactctcgatcttaccaagctggagagtggtaccaaggtagatatttctgttattcaagggtcgataaccaaagatctaatagctgctgtataggtcatcttcaagggcgaaactaccttcggatataaagagtggacgggtccccttatcagcatctccggctcaaagattgaagtcagtggacagtcaggccatgtcatcaacggcggcggagcgagctggtgggacagcgagggaaccaacggcggaaagaccaagcccaagttcttctacgcccactccctggacgactcgtccatcaccggcctgaacgtcaagaacacccccgtccaggctttcagtgtgcagtccgataacctggtcctcgaccagatcaccatcgacaactcggacggtgatactgagggcggccacaacaccgatgccttcgatgttggctcgagcacctatatcaccatcagcaacgccaatgtcaagaaccaggatgactgcttggctatcaactctggcgaggtaagcagtcaaaggatacttctaccataaaaaaacaaatgaaactaacctggttgtccgccagaacatcgtattcaccggcggctactgctccggcggtcacggtctctccattggctccgttggcttgcgctccgacaacactgtgaagaacgtgaccatctccgactctaccgtgaccaactccgccaacggtgtgcgcgtcaagaccgtctacaaggccactggtgcagtctctggcgtgaccttctccaacatcaagctgtccgagatctctagctatggtattgtcatcgagcaggattacgagaacggcagccctaccggtacccccactactggtgtccccattaccgacctgactgtcgagaaggttaccggcactgtcaagagcagcgctactgacgtctacattctttgcggtagcggtagctgctctgactggacctggtctggaaattccgtcactggtggtaagactagcagtaagtgcgagaatgtgccttctggtgcttcttgctagattgctagggatcaaacagtgatcaccagggcatcaatcagacgagagtgggctattttcaaggcaaatttgactgggtgggctagaagacgaggttaaatatgctactagtccctttggacgtcattgtacttagatagccatctgtagatggattcaattgaatggttttcagcctacctaatagtagctgagaatgactatactgtaaaacaccttaaattagcaaaattcactcgtagattcaatttcttatgcgtctattaatttctatctatgttgtacatattttgtcgcaactaacgccaagctgcacgttcgggaggtgcatggtgatgacgcaacgagttcctttccccaatcagccaaccctcaagcttcttctcttacacatacaaagccacacccaaatcatactcagaatgcatgttcttctactcggcggtcatggcaaagtagcccttcaccttactccactcctcctcaaccggggctggagcgtaaccagcgtcatccgcaaccctgcgcacgaaagcgagattctagagctgggccaaggccacaagggcaacctcaaggtgttactatcgagtctagaggatgtcaagagttcctccgacgctcaaaaaatcatcaacaccgttgtaccggactatgtcgtctggtcggctggtatggcaaccctcacccctcaccccgcacttatctctaaacatcgcaacgcaacgcacattgcaatgagccatccccaaatcaaataagaactcgaaaccatatagacctctataatgcactatggaaaatcaacaattccccaaaccacaaactaacacgcaaacccaggcgccggcggaaaaggcggtgcagcacgcacaatcgcgatcgaccaagaagcagcgaagcacttcataacagcatcatttgcatcaccaagtgtaagcaaactcctcctggtgtcgtacctaggcagtcgacgcaagcagccgagctggatgccggacgatcaatgggcgggtatagtgaaggtccagacggaagtgctgccgacgtacgcgaaagccaagctagaagccgacgagtacatgacagcgctggctgcacagcggaagcgcgagcctggaccggcgcggcctttccaggctatcaatctgcggcctgggattctgactgatcagcctgcgacgcggaaagtcgagctggggatcacgcctaagggtgacggaagtgttactcgggaggacgtggcgattgtggcggatcttttgcttgctagggctgatacggagggatggattgatcttgttaatggggatgagggggttgaagaggctgttgagagggttgcaagggagaaggttgatgctgttgttggggaggatgttgagggtatggtcaagaggttttttccttaaggaacaatttccgggcttgaatctctaggtttctatactagaaaaggcctgggattgacaggatactctactcttcggatcttccatatatcattcaattatgaaaacgaacgtgaaaagatataaagtttatatggtgtgcatatctaagaaaacatattcacagcttggctttgggtgcctctaccacccccttgaacttctgcttcagaatccgacgcaggatcttcccactagggttcttggggatctcatccacaaactgcacaccaccccgcagacgtttgtggctagtgaccttgctatccagccatttgataatgctcgctgcttcttccttttcgctccttccagaagacttgctcttggcgctgcgaacaacacaagccataggaacctcggaaccgtgtgtctcactctcaataccaataacagcaacatcatcaatagcatcattatcaaccagatgtccttccagctcggcaggaggcacctggaaacccttgtacttgatgagttccttgacacgatcggtaatgtagaaattacccttggcgtcctggtacccaacgtcgccagtctggaaccatccgtcctcagacaaacagcccttagtagcctctgggttctcgtgatagcccatgaacacgttaggtccactgacgtacaattcaccaacctcgccgacggcaacttccttgggttcggaaccatcctctggcatagtcatatacttggcttgcatattaggcatcaagcggccgacggaaccaatagcctcgcgccaatcctcccaccgctgggagtgtgtggttgggctagtctcgctgagtccgtagccctgtttgatgccaaccttgatgcgggagtaaactgcctctaccagctcatgagtcagcggtgcagcaccggagttcatcatgcgaagacttgaaaggtcatatttgtcgaccaccgggtgctttcctagcaatagcaccactggagggacaatgtaactgaacgagcagcggtagttctgcacgtgagcgcaccatttttctatgtcaaattttgacatgacgaccaagtggtaacccttatataaagcctgggcaagtaggcaattcaaccctagagactcacagttagtatcgtgttcatccgagcatctacgcgattgaaagctataccatagatatgatagaacggcaaaaatgccagtacccgatcaccctttccgtcaggaccaccattccaactaaggtttgccccttcagcgatgtactgctgcctaatattggcaacgatattccgatgcgacagcatgacacccttaggcacacccgtagtcccagaagaataaaccaagaaagctacatccttcgcgggagtgaccttctgcttgcggtagcgagtagcaccagagatattgcgcacagagctaaaatgcttggtccgcacatcgggatcccgctggtccccaatcaggataatgcgatcctcggacaagccgactttcttcgcagcttcccgcgcaacagacagcaccgaggcctgcgttacaagtcccttggcgttagagttcttgagttggaaggccagctcgtcaactgtgtagcctggattcgcaggcgagataattccgccggcccaaagtgtgccccacatcaccacgggtgtgtcgatgctgtttggcgtgaagagggccagcacatcgcccttgcgccactcatacagagctttcaggcccttgccaaaatctagcgaggcctcgcgtagcgatttgtatgtgtaatggcgctgggtatcggcatcttgatagataactggtgggggtcagcatgaagaaaattcaagagaaatgcaaatgccgtgttcaacgcagcgcaccactgggttctcattgaatatcacgcactcttatcgtcggggtaagccctatccttgcgctcaaatagaaaggtccagaggtccacttctgggatgtcgaccagagggtaattggaggcgacaggcattatggaataataaagccaaggattcgatgccggggaatgtgatcgaggctcaaaaagactgtcaggtggaagacgaaagggacgcacacgagcaaccaagtatgtacttaaaagaggtgagatgggtctttctccgcaatctcggctgacggcttgcctcggtccaatatcgcgggggcccaagccaattaaaaactgcttgttccttgactcttcggcattagattggaggaactgaaagatccaatcccatactgttcactgcatattccgaataatcatctgttccgttgaggttcatgcaggatactcattgatatccttgacatccatccttgatatcggcactcagagacctcgatctcggcagtttgacagagataagcaactacttcaccgaatgccggatgaaaccttggaagatagaggaaagacacttttatagaatagctcagatagaataataataaggtctggtgaatggaacatcgcaatgtcatgcccacctggaacctcacaatttgataagcatcagcttcaaaccttcgaagtcaggtaatttgatagtgacctgaaacagtttaatgcaagactataatacacaggacgacgtggagcggcctactcattcgggaagagaccgttgtaggaatatatatatgtgtagctcgagatatgtgtccatgatagcgatgcaaaggtatagaatgtgctgccaatgattgctagtttatattccattacatttacatacaatgaggctcaataaataaataaattggatacccacgatgcccccttccccagagtaaaggtagcggagcccaatttgtggaacaattcacagtaatgtgtacaacggtgcagtccccatgaacctcacgacctagacgtagggaccatgagacgggcctgtcgggtgctgtctagtctgcccctcggaattacttggcctacaatgtgtctggaaatgaatttgtagtgtcgttagatttagactccttccccggcgacacaaagcgagacgagtgaaggagtatctttttgacctcgtcagattcgacgagggactaaatccagatcccaatatgatttcatgccgacaagatcttaaattgagttggaaacagcggacccagactggaaatacatgctgaaaaaaagagcccagatgagagttttgctgaattccatttttgctttcccagcaccatttcctccacacgccactccgaggggaatcgtttgaaatcgtttacttgaggggaatgaaacgggaagagtgggtggcaccaataccgggacgaccgtgcttgacgggcttgctaggaggttgttagtgtgctgatgttaaatggccatgcgaacaattcccgggagcacatactaagagatagagaactcagccaagtagtgaccaaccatctcgggcttgatctcaacctggttgaactccttaccggagtagataccgacaacggagccgatcatctcggggacgacgatcatgtcacggaggtgagtcttgacgagatcgggcttctcgttgggcttggcctcctgcttggccttgcggagcttcttgatgagacccatgggcttgcgcttcaggccgcggttgaaacgtctgcgggcacgggcgtgaacgacatcacggagctgctcggaggaaaggtcgaggagcctgtaaaaggattcagtcaggataatgtccttgcttgtttatgatccctgttgtccattcgcaacgcagcgacaaagaggcgagaataaagatgccatatgcggttcatccataatggttgttgacattgtaaatgaccaccttcaatttcgtctcacgaggtactggctgcgaatggatgtccaaggattcgatgattggtaatgtaaacatactggtcgaggtcaatgccacggtaagaaaacttgcggaactgtcttctcttcttgatctctgctcggcgaaggttcagtcagcgtctgcgatcttgctgtagtgcgtatctcccatgtccatgtcgttccccgctaacgtctttcttcaatcatctccgtatagtcgattgtaatgcgcgccgtctcttctcattcgattcttctgtccatgggcgatgggtagggatgggtttgcttgttcataacgtaccggcagcctcctcggcgttctagatgaaaactccatgttagtgtatcgcacgggcttgaagggcgagggcgaaaaactcacgtattcgatgtcagccatttttgcagatattcctgtaaaccgcctttcgaccgtatctcgaaaagcgaaggagatgggttgtcggaaattgtcgtgtcgctaagcggtcgggctgctaacacacaggctgtaggaggtgggcagcactcgttaagcgacgggtaggttccaagccctagacactataccctttcgggtgatacgtaatttactttgaaacattggttttttctttgtaatcaaactctttgtattttttatttacttgactttgcttggggaaacatcagtagcgtttgtaccatttgtgtaatttatttgtattatgataacccattcccatgatatggcagaatcggaggctgttgatggtccttatcaaagtacaatctgagtacgcttactccgtagttaccatgacgtggatgattgaatctctagttctccaagagaatttgacacgctaactttgagagcgggtctcggcgatcattcaagaactaaatttacgcattgagaaaaagttgtagcgaaggccagacgaattgtattggctataagcttattccagctcacatgaagagtcgcaactgtatcaaaacagtctcaacaaaacacacttgagaagccaaccggcgcaaatcttgcccggactgacgaaccaaccaaacatctgttccccagaactatgatttttaggccttggattaaagcgcttaatcgaagagtccgaatcccatatcctcatcggactcctcctcctccttctcctccttcttctcctcagcaggagcagcggcaccaccggcagcggcagcggcaggggcagcagcagcaccgccaccggaggggacggaagcgagcttggcagagccctcggagatcagctatataaagagtcagcatgcatttcaggtaatatatatgcgcttgcgagtatcactgaccacctggaggtccttgtccttgagctcggagatgaccttctcgacgcggtcaccctcagcgtcgataccgacggaggagaggacagccttgatatcggcggcggagggggcctcgttgccggcgagggcgaggagcaagtaggcggcaagatacttcattttgaatggactggaaaaaaaatcttcattagtatcgaattcaagatcgaatgcgatcgtacttttcaagccgcaaaatcggctgagaagcacataaataaagtgtacgtaccgttggtgattattatctgaacaagagaaacaatcgatttaaccgcgaattgggcggagactgcaacgtcgagttctggtggaagaggttggttgacgaaggattaaccgagtgctcaaaatcttggaaaaaaaggtggtgcgagtgggtgtggctagtgttggcgggacttctaagcgagtgctgtggcgcggtgtattcgctaccacgtgacctttgcatatccggccttgataattgcatgctggcccataaacctgtctctcttctctactcctctactgagtacataactctcacttcgaaagctcttgggccaagtcaggcgtgttcttcacatttgctacttctgttatcttggaataacagaaaatctggagagagccaagccagagatctattctcatgctatcgggctcggagtcatgaagttacttagtcgtaccaaatatcgacggtgagcgacttctttttgtaccactcttcgaatccaggatttaaatcctcgggatatctctcctataatcaaaatgagtgtatggccacctatctttctcttcgtttcacctcattttgactgacatagcatagttcctcgattccattctctcgtctatccagacgggtaagccctcccaacttccggtgactcaggtgcctacctcgcctacacctacctcgcctgcgcctgcttcaatccccaaaaaggaggatcgcaaaccgaccgctgtgcgacggccgccctcaaccagcgggaatgtcagtggagggatcaagcgcaaagctgatgaacagctgcctcgcccaccaaaaccagaaaacaaggtggcaaatagctccgccgcaatgaggcctacacttcccacgaggccagcggtatcatcagtaccacccagagttgtatccaagccaaatcttccgaccacctccaggccaaccatgcctaaacccacccccaaacccagcttgtctgcgacgccaaaagtgatacccccacggaaggagcccgaccccaagcccgcatccgcaggcgctgccacaacctcgaagccgccaccaaagggatcatttgcggagatcatggcgcaggcaaaggctaagcaagagacggcgcctgtgggagtagggttgctacgacaccaacccggctccaaagaaagacttaccaaagtggagcgcaagcggcgcatgatggaactccaggccaaggaaaaagaagcgcgtttaggtaggaaggctggatccggtgtctctgctaagggtaagcctgctgtccggcagcgcgattccgagggaccctcatacaaggggacggccaaaccgacgcaaactcccgaaccgcttacctaccgtggtaccgcgggcctgccgtcaaatcgtggtggaaatgaccgtcgacaccagtctcgcaaccgacaaaatgaatatctcggaactgacgaagaagacgagggcgacctcggtggctacgacgattactactctgatgcgtcgtcggacatggaggctggaatggatgatgtagaccgtgaagaggcggctgcattggcatttgctaaacaggaagacgagaaagagctacggcaagaaatggcggctaagaaagagaagttggagcgccagcggaaattggccgctcttgcttctaggagcaagcgttgaagtttggacattttatacagtcaactggtttctttttttccttctgatcactttccttgatctcttttgttttggataggactacatgttaactccgcattatgagcgttcggggtgtccatagacggggatgccttcatttttttttgctttgaagcaccatcaatagcgagcgctatatcaataccaactttcttttcttttgactattgttctgtacattgtagccaatattcaatattgaagtcatcggcttgatattacaaccccggccccacttggcaggtgacatcactcgcgttcacctccagcataaccttgaaagtaatcttctacaatttcacaatttcaccatttcaccatggagtcagttcatcatgtctcggtctcatcgaagattctcttcagcaaggtgcgcaagattgtgcctccaatgctcgaaaagttccacaaaggtctgttgattatgttgataagtcgattgaagctatcgaccacgcaatgaaaatccccgctgaccagtagtctaggacaactcggccgggtagctgttatcggaggctgcgttgagtaggttgtctgcctgttgacactggtatcctactaactggtataagctatactggggctccatacttctcatccatggcctctgcaagacttggtacgtttcctaaacaggcccatgctctccactagatatattgactattgaattgcagggtgcgatatggtatgtgcgaaagatggcataccttatgcaaacgactaacaaccaccagagccacgtactctgcgaacgatccgcagcaccagtaagctaaaatccggccttgattgaacctactctaaacatgtagtacacaggttatcaaaagctactctcctaatttgatggtacacccattgcttccaagcagcgacactgtcaaggaccccaattcgattgatgcaccagcactggcgggtccgatcatcgcgatgttatctcgcctccatgcacttgtgattggaccgggtctcggccgcgatggcgtgacgctaaaggtagtcgcggaagtgatcaaagaggcgcgggcgcgatcgatcccgtttgtgctagacgcagatgggttgctgattgtggcgcaagacccgggcctggtcaaaggctacaaggactgcatcctcacgccaaatgtggtagagtttgggcgtctagccaaagcgctgggtgtcaaggtcgtcagccaagcggagattgcgcaaggcggaaacggcgacaccatcagcaaagcatcagatgagtgtgagcagctatctcgagccctgggcggcgtgacgatcattcaaaagggtcctcaggatttgatatccaacggggttactagcattatctctgataacaagggtggcttgaagcgcagcggcggtcaaggagacactctgaccggatcactgggcacattccttgcttggcgagcggcttatcatgagaaagtgtgggactctggggagcaggataacgagaaggcagcgcagagcaaggaagatgttcaagcagagctcgattctgagaacaaacgcatgtccccgacaacgactctgctattggcggcttgggcaggaagtagcattacacgagagtgctcgcgacgagcctttgaagccaaagggcggagcatgcaggccagtgatttgaccgatgaggttcacggggcgtttttggacctgattggagagccagaagggtctaagacgcacctctaggctaccatataaaatgctactagctattcatctatgtacgagaaagacagtgcagcggtatactccggagcatatctccatgtacctaagcccagctgcatgtaaacccacggcaatgaaacatgtctcgtccacttttatgatggctctcacaagcggtgtctatagttgccaagaagaatagtctcgaaccctgcatatcttagtcaaaatctgtctccgatattgcaatctcgactgcactgacttacgtggtgttatatcgtagcatagggcatcttttcttgcattttacctgagataaagaaactgctcatagtatgcgaatctttcagccttcaataatccattatcaacatggtcaaaacccgtcttccggtgctgatgcttgagactcgggcctgagtctggtcccagttaccaaccattaggtgaaaatataagactaccagccaataaaggtcgtctgacaacacgatatcatcaccagactcggatgattggttttgagcgggtccaacaaggattaagtgtgtcctggttggacaccttagacccttacccttgatggcatgcagagcaatagaaaccaaaaataacatgtcacaagccctgcctcattccagactagcctatgcccaactttcgcggtctcgcttgttttcacctgcctttatcaggttccaaaggtctgcagaagacgaagtcatttgcataaaagaatgcccagcttgtaaccataaatttgcaagcagtgtgagacatttaccttggcaagtcaaaattgcacattctatacggccgttgacgtcgagatctgaatgtggctagagggatggccctgagacatgcaccccgcctccacccttgctaattcgatattccaaaacctaagcagtcttaggcgtgctgctcaaaggcaatgttgggctaataagccatcgacatcaccttggccgatgaacattggtggtgttttggggtattgttccagatctcgtattcacgcccaaccccgtaccgtatatggctataccaggaaacccaggcggaaaatgacctcgtgatgcaacgcagggaacagggtgaagaacgccttctacaacaaaggagaatgaagcttaaggattcgcctaagcatacagatccttggaaacgagtatataagatggcgaatctcccagcaaaagataacgccatcagaaaccaatccccagacacaagacaccagatctacaagcccaatcatccatcaatatgcatttccccatcatcaccttgatcctcgcgactgcctccctggtggccgctgacccaacatcagggccccagtgtggcacctgcaaccccatctcaggcgagaacggatgtgacccttccacctcgtgcatcaacacgggaacatccttccactgcgcctgccgcgctggtttcaaggcatctcagtacaacaacgacttgcaccatcagttccgcctgccgatgccgaactatgaattccttgttttcgttcctgagtacacggcttgcaacaccccgtgtgatgatccgtatgctgctccttccgatctttgcaacgaggtcaggcttcaacaccagtgcgcggcttagaatattggtccgtggtgggagtggtcaaacaagatagaggggtagtgcagtaggctcaagcggaacctatagcgagatattctggcgggttttctggcggattgcatgtgtacatgggtcactccttaatggaaagaatttgctttagtggagaattagcatgtaaatgtagattaaacaagtagactgagaagatctttcctaattcatctcacgaaatcataataaccgactccatttccccatgaatatacccaaacacccgtcgccttaattttagccagtttcacatgcatcttcaacacgtacaagaagtccgacatcaagaaaacaaaaacaaaaacaaaatgtgagactttcacaattacatgtccatatcgtcatcgacttcagtgaagagcagacgcgtgccgttgccagtgacttgccagagctatagagaacattgttagtaaaaaagcacggtacatttgggagttagccacacttacgttcatctcggcatattcatcgatagtcatggtgaggttatcttcagtgaagcctcgggccagtacacgctcacgaatacgtctcatgctcatctcgccttcctctccatctccaatggcagcggcaccactctccttcatactacggatcaaattgtagatcttgctagatggggtgttgtcgctaccctgctcgccctcactgtatagagaagccttactgatctcaatgagacgcagagcctcatcgacatcctcgcgaacaacctcctcactgaagcgaagacgagcaagtgcctgcgaaagacgaacaatgccgagcagagtacggggactgacatgggaaaactgtctcttcttggactcatcgatcttttgtctcttgcgcatggccacataagcaccaaccatgtaatcggaaacattggtaggcacaataggacggtagctgcgtgccttggcaacatactgacggacctcgtggggagtgaatagcacgccagcttcttcactctccgggtgcttgttgtgcatgtggacgtaggtgacgtgttgggccagctcctcgtcgccctcgcgggacggggtatccagaagcaggaacatgacatcaaaacgagagagcagagcggcgggtaggttaatgttctccacaggtgacacccgagggttgtagcgaccatatagcgggttggccgctgcgaggatggaagtgcgggcgttgagggtagttgtgataccagccttggaaatggagatagtctgctgttccatcacttcgtgaatagctgttcggtctgagtcctccattttgtcaaactcatcaatacagcagataccgttgtcagcgagaacaagggcacctccctccagcaccatctcgtctgtgacgggatctcgcatgactgcggcggtgagaccgacaccactgcttcctcgtcccgtggtgtacacgccacgaggggcaaccttagtaatgtatcgaagaagctgggacttggcgacaccagggtcacccatcaggcagatgttgatgtctccacggatgtgcatgccgtcacccatctctttcgtgacaccgccaatcaagagcaataacaatgccttcttgacatcaaggtgtccgtagatttcgggtgcaatcgaccgtgaaaggtactcatacatattaccggaacgttggtgttgctcgatcttgcgaagagtacggctatccatacccacctcattgtaggacttcttgtgctgtgtgatgtgctgggcatccaagtatgtgtcagtcagcaggccggcgcgaatagcccggaaaccagtgtagggagtgggcaagaagatgcctgccacatcgataacgtcgccggggttcagttgacgagtcagagcgccgtaacagtgaacagtcaaagcgcgaggaatatggcccacagggacctggtcggccatttcctggatcttcacttcctggaaaggaacaaacttcgatgcacgagtcgacaggaagagctgacccttcgagttgttcttcttgcattcctccgacaaacattcggtcaaggggaggaattgcttggtggtgatgggctggaacacctcgcaaccacagcgatcgcaagtgtaggcgttgatctgtacagctggcttgacatctgagacacgggtggtgataccgcggactgtaatcaaggtgccgatgtgctcaccgcgtacataacggacggcgagagctttggaatcgcgctcggcgctagaccctgagggtgtgaggggcttgaagttgacagtatatctgcgggtgagctccggagggaacatcgatggggcagtcgcagcagcttccatgtcggcctccatcgcagtttccatagtctcattccgcttctcgcgttgagacatgatcacatcaagcacatcgtctttgaatctgcacgataattagtttagcagtctgtgcattcacatataaacagatttgacatacgtgacatcctttgtctccctgggcataaccgcatcaatcgcttgagagatgacatcgatatagcgttttgtgttcttttcgatagattggacgagcttcaagtcttctccctcgggcaaggatttctcgaactattaccaacattgtaagctagagtttagtcagaggggctcatattgatacttacaattgacaggtcatccaactcaatcaagatattagatttatcccggtttgcgatatcctgcagaatttgcatgtacttgagcttcggctcccggtgcctccttgctcctcgggtgtttgccccattggtctcatcggcatcatccatgaaatcatattcatcactagtcccgtcgtcgatgttcagatcctccaatgcctcggtcgcagcggcttccgaagacgattggaaggtcttgaaccccttcaggaaatccttgaagctattcagttgcgcggaataatccacaggcggggggtattgaaggagagacataatagcaaagtgcgctcaattgaaagcgcaaagaatggatagtgtgatcgggagagaatataaggaagagggtccgtccagtgtctatcggagccccaaattcgctgggtaaaacgcgaacgcgaggtcgggacgcgctcaaaaacgggactaacccatttaggaaaggtatcaattccgacggattatcactttatccgctaacaatatatcacatgactcgtcatcgggccgaggcgaaagagagatgtagtgtggagtccggggtcgcgtttctacgagttcacgattcgctctcctccttgtctttccggggtccacgatcgttcagcgcttcaaaatggcgcccaagaagcctgctgcgacggccgaagtcgcccttatccccctaaagaactgtcttgttaatctaccgccgtcgctggtcgccctgctggtcaatgcaaacacggtcagtctgctagttgttctgtttccgtaggttatcttcggctaacttctagctataacagactgctcagaatgttattatcgaattacaatataaatcgacctccggaaaggccaatggagctcctccgcagcaatcatgcttcctcggttggacgggtatgccgagcaagcgcaggcttgcgcctgtcgttgggagggacggtatcaacagtggatattccagggagcaggaagtatccaccgttgagcttgatactacttttgggcgactccttggtctcacagaaggccagaaggtacaatactccccgtgcgtcattacccacgtggggcgctaacacttgcaggtcggattgttcatccacctcgatccacccgttgcacatacgataaacatcgagccattgacaccagaagactgggagagtatgtacaagctacaagcagctataattagagtggtacttactcgatataaccagtcattgagctccatgccacattcctggagcttaacctcttgtcacaaattcgcgctctacccaatcctacatacaatgcggctcaatcgatgcatatgcacccactcgcattgcatctctctcccacatctaccgccaatattgtcgtcacttctcttacacccgctcccccagatacctcccccttcgccaaaatcgcgccggatgcagaagtcatagtggctcccaaggttcgatctaagacgagtaaaagctctcgggctgacagccgcagcgctactggtagcagcaggaggagtgctggtgggaggagtgcttcgagcactgtacgcccgaagagtggtcggtccgactccagtacacgaggctccctctacttgagaggcgtagaccgctcagcgaccactcaatattttgacgaggaagtagaagatgacgcaaatcagggccttcgtatttgggttgatccggatctgctggctagccatgagctgcgcggagcgacttgggcatgcgtgtcggttgtccagccatccggtctcaaacccccaccagatccccaacagcaacttgctcaggctgaacagcaaaagtccaatgattctggtgcccctgcaaccaagctcgtggctaaattgtttccatgggaggaggctcctgacaatcggcatgtggcgctttccaccttgttgtgcacggcccttggtgcagagaacatggttggaggaatcatccgagttgaagcagcacccccaccactgcatcgctcggcagtcaagaccctcaaagtctatcctttcataggcgactctttaaagaagaaggacgggctgaagttcggtgccgacactacggcatctcgcgatgccctagccgagcgcctcaaagtcatctacggcagcactgggtccgacacagggctgttctcgggacctttgactgatggaatgattatacccaaatctgactatcacccttcagtctcttcgttcgatggtgctattattcgctttgatccccctttgaagggagctcctgacgaaacaaagtcaatgtttgggtggttgctaggctccgaagccaagctgaatcttgaagtgcaggctgaaatccccaagccatttgaccctagttcgcaggcgctacctatggaggaccctcttccagaaactgcccctgaattagtagggattgattctctcattgaacagtcattgaacaatctaacaaagtcgtcgtctatcttgctgaccggtggtcttggtgccggtaaaacagctcttgcccatctactggctcatcgcctaagacgagatcatctcttcaatgtcaagtatttctcctgccgcaagctcgtgacagatgaaacacgtatttccaacatcaaagagaccttgaatcgcctcttcatgtccgcatcatggtgtgcgcgtcttggtggccagtcagtcgtgatccttgaagaccttgacaagctctgcccagcggagactgaattacaggtgggtggtgacaatggccgcagtcgccagaacagcgaggttatctgctctatggttcgagaatattgcgcgctgaattcctctgttgtgctactggccactgcacaggccaaagagtccctcaataatgttattataggcggccatgtcgtccgtgagatcatcaatatgagatcccctgataaggaaggacgccgaaaggttttggaaaaacttactagcgaagataaacccacggagagcttaaatgggcatgtgagggccacaagctcctcaacacaagattcatggttggacccttcaaatccggggagccgaccaagctcttctgggggtgatggatttgttattggaagggatgtcgagtatctagaactggccggcaaaaccgatgggtatatgcccggtgatcttgtgcttctcgttgctcgtgcgcggaatgaggccctcattcgctctgtctcagatctgacagcaacatcgaagatgatcactctagggttagaggactttgaaagtgccttgaaggactttaccccagcgtctcttcgaaatgttactcttacctcgtcaacaaccacattttcgtctgttggaggtttgtttgaaactcgcaagatgctgttggaaactttgcagtatcctacaaaatatgccccgatcttcgcacagtgcccattgcgactgcggtctggtttacttctctatggattccctggatgcggtaagacaatgttggctagcgcagtggctggcgaatgtggattgaacttcatcagtgtcaagggtcccgagattttgaacaaatatatcggagccagtgaaaagagtgttcgcgatttgtttgaaagagcccaagccgctcgcccttgcgtccttttctttgatgagttcgacagtatcgcacccaagcgtgggcatgactccactggtgtcacagaccgtgttgtcaaccagttgttgacacaaatggacggcgcagaaggcctctctggcgtttatgtgctggcagcaacatcacgacccgacttgatcgatcctgccctccttcgtcccggccgtctcgacaagtcccttctttgcggcatgcccaaccatgcagaccgtgttgatatcatccgatctgtgagtgaaaagctcaagatgagtgacgaagtcacgtctcgctttggtgatattgccacccagaccgaaggattctctggtgcagatctgcaggctgtcgtgtataacgcccatctagaggcagtccacgacacgctaggtgaccgttctaccgatgcagcgaagcccaattccaagtccaactcctccgccaatgcttctagcaagtccttcatccagttcctctattcctcttcagaggaagcatctgggtctgtctccatgccagccccagcagtgatttcagccaagctagaggcaatcaagaactcacgtcgccgccagcgccagctcgagcagggactttccggtgcgaacaacgccgcggccccggtggctaacggcactgagcccgatgcagacgagctgcatgaggatatcatcgtccgctgggaacatgttgagcgctcattggcaaccacgcgtggttcccttcccccagctgagcttagacgtctccaaggaatctaccgtgagtttgtggccggccgaaatggcgagatgcccaacggcgaggctgccaatgagattggagggcgaacaagtctgatgtgatatattttatgacttgttttgtacactgtatatatgaacgcccttgtatgttcgattgattatttgccttctactcctgtatttatcaatattggtaaatggaaacgtccttatacatttgagtctcgtcttagaggattattagatgagaaagggatcaagtttatcgcaccgatgttggcttgcttgcggcaattcatgaagctttgccttgtagattgggttgctttacaaaagttgaagtactagtagcttagggaaagagaatatgaactagttatgttcaaagcggaccgcaagcagtcacagtatacataaacacctccacctcaccgtggtgccgtgggcggctaccgcctacgtgacccggcagcccatattaggaggaggcctggaagtaggggagactcacgggcaagctttttgccttgcccaatacggtttgtaggtagtcggctttctcggttatcatggatgtgtatattttgatttgttctctcttgctgtcctggagaaagctatatactctctcatcagcactaggggcttgtctgtctagccgacacaaagtccgtcacttctgttctaagccgcgagtcttgctcattatcttctgtctttccagacaatccaaaacagcccccagagtagctagtccaatcaccccacagcagccagtagcaatttgctttttccaggtattgggatcactgcagttctcagagcagacaggataggttccgtttgtagtcattttggcgcgtctggcatgatagctattttcagcagtccacatgtgagctgcgacggggcagcgcagaaaagacgaattcgtaaaagaggaggtgttgcatgggaattggttcatgtaaaggctggcgatagcggaatatcgtagaggtggcgaaactatttcggtccttgagagtcagagcttgaagtacatatgagccctggagaggcatcagactcaccatactgcgtgcacctcgtactgaaaaccagaccaagccccggagatattacctaaccaagctccaactgtacatcgatgaatcaacattgggaaccaaactataggtggaagagatgaaattaccagttgacgagctcgtacccggtggtcaaaggcaatctttattggatctgctattcttgacttcctctgcatggttcgggctgcagaaactatcgataaaggcgtttctgatagctttcggcaccaatccagggagcagaacttaaagccacgaggcctatatgtcatattgttaggaatcagaactgaagactaaaccagagagacacaagccttaccaatgggcagtcaactcctcctcgagcatcagcccccacactacagaaaccccccccttaccatcttcaccgaaagcactagcagaaagctcacccagaaaaaatccaagttcacttattggctagctgccgaactctggctccagccaagtcaccagcacaagcgacacccagggaccctatcagaatcaaaagtcagctgagtccaatccatcttagatagaacatgtgaagcgagaaagaagcgagaagaactgggatggaacttaaaccaagaaaacaaaggctggaagaggtaaaaattaagttaaatggacttaccaacgtcgccggcgcggcagaagactcggagcatcaccacggatcaagattggggcgggggtaggcttgccccggcgcgccgcaatcgagcccatgagcgcgcgagcctgctgtcgctgacggtgggcttcataccctgggatctgctggtaagtggggggaatcaccggaatcctaatgtcggcaaaccaggaggtcgcagcctgacggctgagcccgtagcgggggtaactacctgtctcgagagagacacaaacctcatcggtagaacgggaagtcggaggtccattctccatggaccagaggcccgacaaggaaaccatctcgaaggcatccattttgcaagttgttttggttatcaaattgcctttgtgtgcaatgaaaaagaaggagaaaggaagagggaaagtgaagaggaagtgaagggagaaagaaaaaagcagaagagaagagaaatgggatgggatgcgggctgtttacggcccaaagaggaagggtcgaccgacttcagagccgaaggggcgacaaagtatacaaatggcatcggctcgtagtcgctcctgccatctcatgcataagaggtgggggactattaagcacgcgggcactactgtcttgttatgggtctattcaattagggctggcggtgttgcagtttgatcgaattttgtagaataaacaaatggcttagagtatttcactctttctctagagccttatcaacaagacgttcaagcttgttccattcagcggagagaacagctttggtcttgctaggatcaatgccattggctttgaactcattgtgaacctgcagaaactgatttccaacaagcctcttgaagctaggcacggtgcagctctccgcttgggtgctagtaagttcggcgagaatgtaccatatcaagtagtgaaagttcagcttgaagtcatgaatctggacagggtctttggggtcaggttggaagccctcctgagaaataaaaacagtaagcctgactaggctccatgcatggatgtgtcggattggatgggctttgtcatagacaacaggatcaattcgcaggtatcgaatggcagcgtggatgaatgcccgggtgaatttaccagccgttagcagagatatgatgagcttgtcgcgcagagaagcatatggctgacgggtgagaggccatagcgcagtttcatggagcttgtgcatagcagcttctaatttctcgattgcgtctgctggctctgtgctggttgctgttgctttctgcatgagttctagggcttcacgctctgctgtctctagggaagtcatgtcttcaggtatagacaagaaccggtcttcaatggtatctgttcccatctggcactttgtgcactggcaatcaaagaagtagcgttctttcaattcgttgcgacggatatcgtatggtgtcgtggtgtcgatgtaggagatgaatatttgctcgccctttttgataggacgcatagctttgacgtatagttcttcaccatcaaatcccacagtggagttataggcgcagctgtggttgatcaggccggcatatggatgcatgtagaggccaatgcggtcatacatggaggtggtaaggttgaaggagttgagatcaagctatgatatagttagacaaaagtccgcgatgaaaggtgtaaggctaaaaccaattaccttggcagcataagaagcgatagttccttcatccacatccgtccctgagtaattcttgacagctcttgccgtcaggttaatcctatcaagctggccttggctctctgatatctcgttgatatgagtctccaagccatcaaagaccttgaactcttcagcgtcgtatttgctacgcgcagtgcgcagtactacacgtaggagagcacgggcattgttgggaagaaccataggcttgacttttttgaagatggggcattcaagagaatgcgcgaacttccagtccttagattgacatacctaaatcaaatattagaatatcaaaccagtaatctttggtaggacaagaaatatgagacagcaaacagtatatcgtatatcccattagcaactcacccgatcacaatacttcacgacacggcatcccgtgcaagcctttaactcatttccagtttctacctgtctctttccgaagcaaccagcacaagtgtcctctaaacgtggggaatcaagaaccgccacaaatggtgttttgatgtgcaaaacatcttcaccggggttgatgtcggctgtcgcaaacagaccgttacccaggccattgggggcaggctgtgggaccgttctggtcgttaccgaaggtagtgcaattcttgatgccattttaggtgatctgaatacaggaataagaatgtttgaagatataacaattagagtggatagtcgtccacacgggcagggcggtgaatattcgccattgtatttgaatatcttggcattaatagtggaagattaatagaatctccaacataccacaataaagagcagtcacatggaagacattgagatttcccttgtggttttactgcttgccaattcagcttaacagaagctagaaaccagctctatctttatatgcaaagtcgcgacatggtatgaatcgggcaaagaaatactcctacaaatccttttaagcagaaagccataccaatcaagatgaatatttggagccaaaaagaatcagattcgaggcgctatttaggtaaattactaggtggacatatagcatagctcattcaaagtgtataaacccagagactcaagtcccaataaattaaacatcaggcatgaaaagaacatgaaaagaaccaaactcaagacctagagcatagccgcaaaagcagcagcagcagcaacagcgcccaacggtgcagcagtgatcagaggcttggcagcagccgcagcaccagcagtagaagcagtaggagtaatcttcaccggtgtagtcgaacccgtcgcattagccttgaaagcgtagataccatcggtgacagtaagagggtgataaataaccgaatacgacgggatggattgtgtgctcgaggtggaatcggaaatggtgtgatcaccctcggaggcagtgtactcatacttccacgtgcaacgagcagattcagaaaggcgggtgaaactgcatgactcgactgcggtcgcttgagcagtcgcacccttggtcacgacagtcacttccagggagacgctgtaagtcgcatcgccctggatcagggttgcggggcggttcagtgcgcacttggatgcgcctgccatgcaggcgatctcataggtcgtggcgtacttgtcgatgccagcaactcgggctgcgatgctggagtaggcgccgatattggcgccgtagggattgtcaattccgaaatagctgacggttgttgtgctgggctcatcagcggtagtcagagccgctaggagagaaacgaggaaccaagatgagcgcatatttgcaggattcgaagatgagggatttcaaggttgtgagaatagagagaacagggttgggcagaagaaaaggagttaggaagcaggggaagtttttcacagtcactgttatgttagctcatgactagcgtgcccgatgggcctaaaaagagttacagagttccgcaagccaagcatcgctcgtatacaagcgctatacttggcacttggcactgacaagtaatttcgtttaagggctgtggtaaggaaccaaagacatatcggtacagatcttgagggcctatggttgtgacctacaagcatcagtcaagacctaggctatcttgaaggtgaagaagttcaaggtggcatttgaaggcaacaaaatgatggctcaaggacaatagaatagaagtcattagtcgcaaaggtcggcaaagattgctgtcacgaggacccgtggaccctatcaagccctttcaagtgagacatcaacgtccttctgattggcgcccacaggaggctcaagcccctcctagcctaaactaatattgtggctgagcccctggaaatgaataatgataggaccctgaatatagctatgcacaagtatggagtacggaaaatatctcaaaggtcaaattcgtataggatcggccgtagagcagagagtatagacgaggaacaattcgaagattcataaggaaaagacaatattccaatccgagtacaataattaaaaaaggccaaaaggacaatgcgcgccatctatcaacaagattgccctacccactacaccgtacaggaagtttgaatcctgtcctatattggaaaatcatgacgggaggacctggggaggccatatgggatatcgaggggaaaagagaggttgacttcctctctcttaatctcgacatggtggggttttttttctcttcttctgtcactgtgtgcaaaaaagagagatttacagtgccttgccgccgacaaagttggcccaggtgcggacctcggagggaattccttcggcgcggggcagcttctggctcatgcactgagcaaagagctgggcagtctgtagaggatcagttagcaagttgaataattatggagtatcagctctttgaacataccttaggctccatgaatagaggcacgctgaaatcgacagcgttgcgacgcatgacatagtcttcatcaagctgggtcttgccacgggtcttggcaaggttgaagcagccacggatgtcgtacttctggaacacttcacggagagcacgcttgtccttcttggggaactcaatcagcttcacggagacgtcattctgggcggtggactcgatgtgagccttgacttcggggttgacggcatagaacttgtagccaagagggtgcaggtagtcgacaatcctggtcaggtagggctggttggtatcaccgccgagcaagataccctcgccgggctcgggcacgcggaagttcatggtggactggagggaagaccagtatgcctcgatcagatccttaccgaagcaagcaatttcaccggtggaggacatctcgacgcccaggaaggggtcggcaccagccagacgggtccaggagaactggggaaccttggtagcgaggtagtcacgcttcaccttcatgaggtcgacgggctcggggacatcacggccgacgagagccttggtggcgacgtcgatgaagttggtacctaggaccttgctgacgaaggggaaggagcgagaggcgcgcaggttgcactcaataaccttgagcgcgggctcgccaccctcctggtcggccttgatgatctgcatgttgaaggggccagtaatgttccaggccttagcgaccttttcggcgatctccttgacgcgggccatgatgggctcctcaagggtagcggggggcaggacgagggtggcatcaccggagtgaacaccagcgggctcgacgtgctcggaaacagcgtggacaagcagcttaccgttggaagcgacggcatccacatcaatctcctcggcaccctcgatgaacttggtgatgacaacggggtgatcaggggaaacggcagcggcgttcaagagcttctccttgagctcatcgacaccgtagatgacgttcatggcggcaccggacagaacgtaactgggacgaaccaagacggggtaacccacagtgtcggcgaagacctcagcatcagcgacagaggtcagttccttccaggcgggctggtcaacaccaatgctatcgaggatagaggagaacttgtgacggtcctcggccttgtcaatgtccagagggttggtacccataatagtagcaccaccgctctcttgcaggcggagggcaatgttctgaggaagctgaccaccgacagagacaacgacaccgctagacgcctcgagctcgtagatatccatgacacgctcgtagctgagctcctcgaagtacagcttatcagcggtatcgaagtcagtggagtaggtctcggggttgtagttaatcataacggtcttcttgcccatctcacggagggagagagtagcgttaacagcgcaccaatcgaactcaacggagctaccaatacggtacacaccgctgccaagaatgataattccgtggtcatcgaaggtaacatcgtgggaggaagcgttataggtagtgtagaggtagttggtatcggcggggaactcggcagcaagggtatcgatcttcttaacccaaggagtgatgccgaaggacttacggcgagcacggacatcatcctcggtagatccaaccaggagagagatctgcttatcggagaaaccgagcttcttagccttcatcaggatctcctgcttgaggccgaagaggctgccgatttccttgagttcattgttgcaatccacaatgttctggatcttgtacaagaaccacttgtcgatctttgtcagctcgtgaaccttgtcaacggagtagttctcgtggagcatagcctggccaacagccaaccagcggcgatcagtggggttgcggagagtctcgtcaaggtcatcaaacttatcaccctggagaccaaggtattgagggtcaacctgacggatggccttctgcagggactcctcccaggtacggccaatagccataacctcgccgaccgacttcatggcggagccaatgtcgcggttaacgtgctggaacttgctcaaatcccagcggggaatcttggtgacaacatagtccagactgggctcgaagttggcagtggtggtcttagtaacggcattagggagctcgggaagagtatgtcccaacccgatcttagccgcggtataagcaagcgggtaaccggtggccttggaagccagggcggaggaacgcgaaagacgagcgttaacctcaatgacacggtagtcgagtccatcgggctgcagagcgtattggacattgcactcgccaacgacacccaagtgacggacaatcttaatagcagcagtgcggagcatgtggtactcctcatcagacagagtctgactaggggcaacaacgatactgtcaccggtatgaattccgagagggtcgaagttctccatgttgcaaacggtaatacagttgttggcagcgtcacggacaacctcgtactcaacctccttccagcccttaagggacttctcgaccagaatctggggagacagagacagagagcgcgaggacaagtcacggagctcatcggggttgttggcgaagccagaacccaggccaccgagggcgtaagcagaccgaacaatgatggggtatccaacctgctcggcagccttgagagcgtcctcgacagtctcgacagcggtcgattcagcaatgggaatatcgatctcgttcaaggcctgggcgaagaggtcacggtcctcactagtctccagggtcttgatgggggtgccgagaaccttgacaccgtagcgttcaaaggtgcccatgcggttcatctgcacacccaggttcagggcagtctgaccaccgaaggtgaggagaataccatcggggcgctcgcgctcaatgacgtgggtaacatattcgggggtgacggggaggtagtagacttcgtccgcaagcttgtggtcggtctggatggtcgcaatgttggggttgatcaggatcgagtggacgccagcttccttgagagccttgagtgcttgagagcctattttatcgcacagtcaaaagattagttacagttctcatttagattgatttttagcgatcatttttcaagctctctgtattccccacagaaaagcttctcgtgcagacgcaacccccatggggactgacagggcgatgtgatcgaaaatttcatctccaagtgattgcaacttaccagaataatcgaattctccagcttgtccaatgctcaaaccaccactgccaatgacgaggaccttcttgacatcgacgaggttgctacctgccgacacagcaccgctagcgagataagactcagcagccgggggcctctcagcagccaggcggttcaatgtgctagagaaagaacggagctgctgagaccgagccgtggggatcttctgcaggcgtagtgtggaggccgttgaacggacggactgagatgagaatgcgcgcagagaaagtgctggtcgggtttcagcaatgcagcgctggcgcagcagagcggccgcctgcccacatcgagcagcgagagccattgcgcaccgaaggtaatgtttcaattgctgagggatgtgttgaggatgagtctacactttgctgggattcttttttttccgcctcgaagtcgctaattggctcgttccgtccaccgtatacggctccacttttgaagaccaacgagggaaagccgggggatattggggattatataccagcgtagatcgggaggatctaataatgaatcttgataatttagtatgaagaggttgggttttatatttgcttcattattcccctttttttgtttattataatctctttttttttcagttggtggcgatgagtcaaacctggatgtggagacgatctctcggctatctttcttatactaaattgtatgccccggtgtatactaattaaagccttggtaattgtctattgccatagctacctttcatgtatatagaagatgtagagtgtataggcaattggagcttccaagaacatcatatccctccagacaatcttggaaatgccgatgccggacctcaaccctatctcttatctctcaacatcgagctacgatctcccaccacaaccctaattgacagtagattggctggaaaaaggcaaccttacatcggctgtgactggcgacacgatggcgctggtgctaatgttgtccgttctgacattgccgtcattaaaaacgaaaacttagatgcctctatggccattgcatttgcatgggataagcataccgaagttgatagcggtggatcctaaagattcactggaaaatgcatagcaaatataggaaggaagctgtcatttactggtataccattgttcagactagtggatatggcgagaagtacgagcctatcgatggttgctagagaatgggagtatatattgacaatacttgggtgccaaagataggctttgtacatatacagctctaactaataaccgagcatcatggataaagacgcgagagacatgaatgctatgagagatctatagatgttgttatactcatctttctgggtaaacccccaaccttggcgactgcttagccaatttacctcggatattactcgatagctttgctgcaattggtatactaggctgtatgtgcatttctagcagagatattgtagtgatatgtcctactcgtggagaatagaaagaatatacaaatgagatactctatatatattcagctcttactccctcatataccatccaatcgtgatactaaaaacaacccacagaattcacaggcgaacagaacaagctctataatagcaactactaccaagtaaactatcgcgctagaatggaattgagtatgtatgtatgagttcgattccatgatcctcttactccgtcggacaaaccccaacaacctcgagagctacaccaaaagaccaacgcacatagctggattacgctgtaatgagccgatagagtatatggtatattgtacatttaaaaaagctattatactacatacatcactgtacaattattccgcaacccctactctcccattcagacgtgaccaaggaccactcggttgtttctcaatccgagacccaccacccctcgacatcccctttggagagcgagtttcggaggcccagaaatccgacccatctcggttctgccgaccctccagcatgacctcatcgaggtcctgattgagcgttttacatacttcagccaaggtttgtcgggcgtcctgcgcaacctcattacctaatgcgatcttttgctgaacaaactcctttccgttggcagctgcagcattagaggcaaatgcccatgcctcagcaagaccaacgacctcatccggggtctgctcggaggtctgtgtctggattcgcgagccaagagtaggagtatgcttaaagcgcggctggcgggcgagaatggggtattcggggagtaggtgggattcatcgctcagacgattgagggcgcgaagggtcgtggatttttcctttgacagtaacccggatagataggatctctggagagccagcgacttctgactcttatatagcgggaccagggtttcgtttgtgtataacagaacgtcgattgggttaggaggtggcatttctgctgtggaaagttcgattttgttggttgttcgtgacggaggcttctgggtcaaattgactggctgacaagctctggacgcggcgtcgaggagatctcgccgggcttgtagatatgcggcatattgctctgcaatctgtatcttgcgattctctagccctcgctgggcctcctcgatgtcctccggaggaagctcttggagcagactctcatctggatccccttgaccaaccagccgttcctccacccattgtactagctcatcccgggtcctttgtaatgcctgtgctttggtatctgcagtctcggcttggggatcatgctgtgccttggctttctcaaataattgcttctggcggtccaattgagccctcgcgcagacaactgctctctcgaggctatgcactagttcatccaagcccgtttcagtgtcattgcgcccgacctccgcatctgcctccggcaacagaatttgctcgctattattgccaacgtcctccacgctccccgaatcgcgggttctaatctcttcaagataattctgaaacacctgcagcttggtatggcggcgtcgatcgcgtaggagagcaaggtattcgcgaagttcggtgccgggctcttgcatatcagcatcgtcagaaggggctttcggggccgtccgctggcgccttaaagaggcgacatcctcagacgccaaggcgaactctttgcgggcggcaacattggctgccaatgccttgagataatcctttctcagcccaggaagatcggcagggatgcgtttgacattggtaacggcatcggtcgacgcgcacagggagaggtgggattgagcaagatcgcttgactgatcgttgaattcgataaatgagcgaagataagacgtcagtgcctggcggatatgaagggtttcctggcgcgatctgacgtaaggagcaagtggtttcaggatgtgtggaatgtgggtagcgtcaggagcgttggatcgggccatggtttcattaagtgagggtttgaagcgacaagcttggatatctggagagtcaaccttagaagccgagaccctgacaggtcttggaagacttcactgccacaatacacaatgcacaatccacagcgatctcgtgagatcgaagttgtttacctctttcacggcgggctgttggcaggcttatgtaacatgcagatcgtctcccgggccagtgccgcagtggagtttattgttttgcaagtccagcatctataatatgatgggtatgacgttcaggaaccggcaggagcttaaagacgccgatcaacaatgtattggcccttgggtcgattattgctcgatttattggacagctctaattgagacatccaatatgccgcaaagtgggcctgagcaccatgtctgttctgtacaatccccgttcatttggatgtttgccagtagattaacatatatattcatggaatgtgccatgagacacctatccgacagtcattgtagcgtatcgatctttttcgcaagacaaatagtgtgaatgttcatccaatatgtctggaatgccatgttatctagagctacggagtacaacgtaggtacatgtacatgtacgtacatacatccagtagatgcagattacgggcacggcccaatcaaagcgacaaaggataagacatctcacggcaagagagaagcccaacttttcggatttctctcttgcctttctcgattcctttccctgaaggagcaggcctttgaccccctccataactggtatgtttcaagaatatccctggaattgcatcaaggggtgttttgatctaattctggactaggatctgactgttcctgattattgtctcaaggctgaaacatttatacttcagtccttgcgacttacatgctgactgcgagtgcgggaaagcaaacttaacgtttagcaatatcatcagaacatacctgacagccatggctcctgacttgagcgctgcttccgactctactatggcacaacctcctgcagcaacgacggcacccgctatggcatcgcaggctccaacatcccgacaaccagtacacagttcccatacttctgtaacacttccgcccccaggaagcccaccgcttggaacgggggattatggcatcacaaggaccgctcagggtaagtcgccagtggcaggcgtcactttgatgagctccccgactaacagaacaagggccactgcgtcatcctcagccgctgacgccttcggatctccatctagtgcttgagaaagagcaagaagcgattgtaagtgggatcccagagcgccaaaagtatatctacccctcaactgctgacgcgtcaaaactctccgcaggtgaatcgattgactcgagagctatctattcttcgccagcagacagcatctgttgcatcgacgacatcctccacgtcaacttttaacgaggcagatggtgcgcgggcatcacccgccctcagcagttcaaccccatctcactccgcgcgacgaaaccgatccaattcgagtctcagttcacatacttcagcaagccagggccagcagtctgcaagtgtcactggaattgctccctcgcgggatattcaatatcgcccggaccattctcgaacggttcgcagtcgcgagccatccctcacctctcgccgaccctctatggggtcactatcctcattccctcacaacagcaacatatacccacaacggagctcggtctcacagacccagcaaggccattcacccggaaactccctgtcgcggtttgaggaggctgcacatcacaagttggaagtggaatacatgaagcgggagaatgagcagctgaggaggcgggtccgagatctggagcagactttgaagaggcaaaaggaagattcggccagtgaggcttctgccacaccatctgagagaatcattgaggcctgattttcaatttccactccaacccatatcattctttcgcattgcgcaacatttttatcttaggtttgcaggcaaacacattcatcgaaattataaaactgacatgtgaaaagcaatttcaggcagccccattgaagaccatgtagtccaatgaaacaaacactacggagtagaagaaaccagaacgaaattaactacgtgaggcggtgcaacagccccgccatacgtcaccacgtcaccttgtggcgcagtggcccccttagataaatagtcgcatcccaccagggaatgatgagatgtttagattccttcgcaagattcttcctttatcctctacctaacatcatggctaattccactgtccacgtttctggcatctcgtcaacaacctccgagaaggaggttcgcgacttcttcagcttctggtacattattacaatgattttttttatttgaccaagtgctaacataaaacagcggaaagattgtcaccctctccatcaccccagtctctggggaggccgatgctccgaagtccgccactgtgacgttcgaaaaggaggcgtaagctaccccgcacccagtttcagcccgcaatcagcccacatcaacacaaactaacgcaatttctaaaacagcgcagccaagactgccctcctcctagaccagacccaactgggcacttctgccgttcacgttgaagcaacccacaacatcgaagaaataggcggatcccatgtcaccgacgcggagaccgaggcccgggaagaggagcacatcgcgcaagaagacaagccccgatcgcgcatcgtcgcagagtacctggcgcacgggtacgtagtgagcgacaatgccatcatgaaggcgatcgcgctggacaagaagcacggtgtctcgcaccgcttcacgaccgcgctcaccaacttcgataagaagtacaatgccaccgagcgcgccaagggcatcgataacgactatcagatctccactaaggcagccaatggctggcgcggcctgagctcgtacttcgagaaggccctggagtccccctctggccagaagctgcgcgacttttatgttcagaccgataagcaggtgcgcgatatccacgccgaggcccgtcgtctggcggatttgaagcagggtaagactgaggctgctgccgctgcccctggccctgctgctgttgctgagcctgctactgagcccgctgctcagcccgctgctgttccttctcagcccgaggctgctgctgcgcctgttgagaagtcctaagggattattggaatgagatcttaaattaatgtggagatgaagatttgcgctgggcgtgtttcctttgtgtctattactttatcctttccattattacgatgtcatgtcatgccgtgtcaatagtttatttttctttctgataaccgattttagggctctttctatacacgtgagcctttgataactatggtctccaataagcaaagcaaattaacatgaagattgatttcaagtcagaggtttaatgtattgttttactaagtacattactcaaatgaagagattatttgagcttattcttcatgatgtcattatccgaaattcaaaaacaggaccttccaaatccacaagagataccccatctcaatggtgtttatcgttggcatatttcgccgcctcgatcttctctagccggggttcggggttgctcgtcatcacagtgtccctatattcctccgacgataacacgggttctggttgcttgccgacattggtcttgccggagccggggatatcctgctgctgggcgccggattggcgctccggagaaggggattgacggccgggtaagggagcagacattattgtggatattgtagaagttttttaatgtgctgaagagagggataagtgtgagtttcttaactgaagaagggaaatggaactcatgagatatggcgatcttgacagtactgaccttcaagtgatgtaggcttgtaatggatgaagatgttgagtatgtgtgtttgaacagtagagtctaaggaatagtgcttcttttattttatcctggaaaccaactgacgttaccaactaaaccggtcattgattgggggtcatcatgatgacgttgagtagcacttggaacaaggcctacaacatacaactaccacaagacgatcctacaacttactaacggtatatacttaagtatccttattgtagttatagtacggagtagtctgtgccgccatagatccttactatgggctacttctgacttctttgctctagaaccaaaaccatcacttctttaagcgttgtttcatctcagtaaaacttgtttgtgccatgaatatattcacgttgacttcaagagcaagccgtgcgcgacgacgtcggaatccgacaatgcctcgaggatacaggtcccaccgacaatatggataatgctcctgagccatgacgtcacttgtcacgatctttgttttgacctcacctttttccttccatactcctacacgagtaatcttagaatattcttataacaatctggattcagttccgagtccactaggtggctggtttcgacggcactacaggttccagagctggaatccatcattcgtagcatggctgatgtactatatcatgaggaaacaagggtgtcttcaggggaatctgtgcatcgaagaggattagaaaggggaagagggggaataccctcgagcagaatgtccacaggtaggacttttaagagtacatcagcgagagcatcacatgaaaaagacgtgaggaaagaaaacacggagatacagagcagacgggacatgatctaaagaagcgggaaagacatgaaatgggcatatggtctcgtgaggaaaatgtggaaggaggaaagaaaaatcgtccgaggcattggaaattcgaatccttttttgtttttctcaatccatctcggttatagtctcttagttgccgttggcctgcatgcccgctgcggcagcggcttctgcgttggcggcggcgaccatggccttggcatcggcttcgtggaagacgccttgtatgacctgctgctcttcgtgaccaagaaccttggtcagactctcgtagagctggggctgttcttgttggaggcctgaaatcgaggttagctggtgataggatactctcttatatgtcacttactcaacaggacatgcttgaacatgccatatggctccaatttgtccagaggggtctctagaaggctttcctcgtccatgtcatcatcgtcatcatcggtgtaggagccgaatttttgagcttcctggttgaggaagtcgagataagcagcactctcgtcgtgaacatcaccctcttcaagagctgcttcaacctcgttttcgtcccactcaacatctccatcccagtcattgtcttcgtcgtcttcatcatcctcgtcatcgagggtgaagtcggactccttggtagcatcctcgcgttctggataaattcttagccttggggaaacacgacgggatacttggagaaacatacgcttgagagcagcaggcagggtctggaagagtcttgtcacaccctgcaacagtcttggccatccctgctggacactgaccggaacatcggcagccttcaaagtaagcagtgagctgattgcggcaattgacagctttttgtcgtgtacacgtctgaagttgtcaatgttagcgaaccaagtgctgaagaatttgtttgtccagcccttagcctccataacctgcagactaagagctgggttgtagtaaatggcgttaatgaccatctccatcaagtggatgcggtacgacttggtgcttgcctcgccagcatcgataacccgcatagccatctcaatgaacatggggatgtactggtcaatgtgaccccgaaggttgagcatcagggtctcagcaagcttgcatccgcagatgcggtcaacgccaccaacctgttcgtcagaaaagatgtcctgcaccataccaaccatagcgtccaagtaagctgggttctgaactagcatatcggagccataagcgacatagttgtcaagggcgggaagcatgtctgtacgcagaaaagttaataaaacatcaaaaccgcgtgaatttatgtgaacttcaccttcgagatacagctcagcaccagccttgaaggtcttgtggatcagctcgaaagcttgccacatagatggggaaatggtcttggatgcgaatgtgcagctgtcaatgatctcgaaaatttcgttatagagatctaaaatagccagttagagccgcgcatacgcttgatatattgacaaacttaccataaagcttgttctctagggtgatgctgatgacgggcatcaagatagtctcgaggtgcaaaagcacgtcaggggtgctctcgagtgtgagaatgagggtgccgatggtctgtaacacacccagagcggttatgctcttgtcatccaagaaatcgccgtagccatcttcgtcaccacccttggaggcattgcgttccaagagctcaccaacaatacgcatgtatgtatcgcggagctgctcgctcaacgctacagcgaagggagtaagctcggcagagaatacctcaacaaagtcctccatgacgttggctagagcatccacgtcgacctcattggccaacttgagaagctgctgcataatctggggaatgttctgctgcatcgaggtacggatgacatcgtgacggataaggggctgcagagcaagggcagcctcaactcgcacgggaagttcggaatcggtcatggactccaggatgtttcgatagataaccatgaggttgttagggtccttgaagtcgagctgctcgaacttctccagggtgtcgcaagcacgagcacggaggaagccatggggactgcggaattcggggaaaacatgacggacgaagaagtattcgacctggtcagcaatcgggctcttcttgcccaggataacggaagcaagcgagccaatcattctcaaagcgccctccttctccctgggctgcttctgatcatccggcgcagactcatatttgctaacaacactgtttacgaatgtaagaattgagaaggtctgcttcttgcggttcttggtaagggaaaccaagaagtttgtggcggcaacatcaggagcggaaacctcctcatagaagttcaacttgcggtggagatactcagatgggtcatcttcgaaaagctcaatatcctcgtcggattggcacaagatagggaaaacgaagtgggcaatcaggttatccatgtgcggcttcaagtggtcccacatggcctttggcttgacacactcctccataaagaccaaagtatacgaaagtgcggagttgctgagccattgtgtcttggacacccacttgtcaatctccgtcaggtatcccttgagaatttcgggggcgaaagtgctgataaaggtcttggcatacggtgtgtagtcgggggtagaggatttcgtgatcgtggtagggttgccatatctgatgaataggcggttcaagttggcatatgaccacttcttgcacttccaccagtggttcatctccctctcctccttcgagtctgccattgagctggcagggggtgtcttcgagacaatgcgcaagaatagtgtacaccagtccacagtcgcttggtgggtctgtaggcatggagaaagctcgaactaaaatcgcaatcagtcagtataaataacctagccccgcgcagactagaatcagggtaactgacataaattgcgtgcttgaaagccttcactacaatacgaagcatctccgcagcctccagactttcctcatcaacaagcttcgatccgatgctgaggagctgtgggaatgacagctccacgatcttatcaaactcctctctcttctcgccagccttaaacctgtaaacccggcagactgccaaaagacactgcagacccgcatagaccgtactcgcatcattggtgctgagaagctgcagagtaagatccaaaaaacccggccactgctcggggaagtcgttttggagaatcttctgcaggaggggaaccagttgattgcggacgttgggaggagtcgaagccagagcagggataagtctctccctgaaactaggcttctcgatttcgggaatcggcgtacgctgcgggctatcttcgacgggggcccacccacgggtaatacggttcttcaggtaaacaccagctataagagtgagcgggtcagcaagggacagcatttcctttgccaactaatatagacaccaaacttaccagagagctggactgcattgttctgctcgccctgcaagatatccaagagtccattgataaatccgggttgtgtctcggcctagatatatcaaccacgtgtgagtctgacgtccggtgccccgccagtcgatccagcacgtacatatttcaaatcaagctccgcttgccggcgtatatccgcattcgcgtctagagtagactgaacacgatctcggagggctgtgacatccatcgcgcaacaatcccccaacaccagaaagtcaaaaaatctccaaatacactgagaaccccggggggagacgcggaccggcgctaatggaagacgggcgaggaaaaaaagtcaagaattgtaaggacgtgagtgtccttgaagagatcggtctggatcttgaagacaaggtgagagaagatgttgttcttcaagaggagggggattttttttcgattttcccgactctcgggaggcggtcgccccgcagctaatcagaggccgcacacacggattttgtaagaactatgaactacctagatgtgggctattgtgagcttggataaacactgagggttgatttattgctctctctaaaacattacaggggtttattattgatttatatagagtttgatggtttcgtattcattccttcatcttgattacatacattgcggaatccatcagtggaggagaggttcatgactacccaatagggccgcaggcatataccccctaaggattgggtatcttcacatgtaaagagaggccgcgaagatgacatcgcgcttgatcaactcctgagcttgctgcatcttagtgtaaagtgtcgggtctccgaccagtttggccgcattcttcacttcgcgacaagtctcgtccagtcgggtgatcacccgaacaatagtaccctccattacgtccgtgaggtcagtgatgcgattgaaagacattcccttggcccactcataaacaacttcagcgagaccgaagcgtggcttactagcgaagtcgttggaatcttcactagattgaatgacctggtgcagaatctggaaatcattcactttctcggcgatacgaatgatctccttctggcccttctccagacgtggagtgagggtgggagtgctgtctgtcttttcctggaacacaaatgcagagaggagtgcaacaatctcctccggctcgtattcagcaagaacgttctcgagaaccaattcggttaagaccaactcgtcggcggagtgaatttcgcatgccaccttgcccttcagttgtacacgagattgttcgtcaacaaagccgagctccctcagtacgtgaatgcgctgctcataatccggaagtagttggaggttttggtcggacatcagctgcttcaactccgagatgttttctttaacttgccactcgtcgtgttgcatttcgaactatatggcattagtatggggttcagatcaataggaatgagatactcacatggtttacgaaatcaggacattgtagacagtggcatgactgggcaatctctgcctgaacttgtcgtttgtcgaggatatcgcggatttccatttctttgatacgttgccagtcgatctcgtcccaggccgtatcgatccaagagttggtgaactggcatagttctgtttctgcccacttcatagactctatttctgaattagtattttcgtaaccgtatgttcaagaagacagtatgaacttacccttcttaatattcagataccacattggttttgtgattttaacctgggtgtttgtcacgcactcgagatcggataacggaatcttgcacactcgaaggctcatgtcatctacacgattggggagtggttggaagtagggtctgaataaaggtaagaatggaagaatgtcagtggggtgccgcttgctactcaaggttccaatctcaagtacttgaatacagggcacggccccaatgactccgggagaaactccgtcgcgcgtaataacaccagcagtacggagtccatcctgtgtttcacgttagctttaaaccaaatatgtattatatcgcaacagaacacgagcactcaccttgcggtacacaaccaacctcttcattgtgaaaagacgtttgccgacaggcgatgatagcagttcggtgtggaactcagctgtgagctttcgatactccatggcggcgttatggcaggtcaatagatccaaatcacagatctcacatggtgcccgtttgattttcgcaagactggcctcagatacctggacttgcttctcgtgttctggtaagagggcttgtgttgcgttttcactgaaactccgcttgatcatttcctcgatcttcagggcttccacacgcaacagatttagtatcatgttgtatgtgagtcggaattgagatctgagctttgtcggatctccaagaatcatctgtttcaacgaggcagcagatggggcctcgtcttttccactgtttgtcacgatgacatatcccaccgtgtcaagacctctacgaccagcacgtccagccatttgcgtatattcgccgggcaggagatcacggaagcttttgccgtcgtgcttgcggaacccggagaataccacagttcgggtgggaagattcaagcccatcgcgaaggtctctgtggcgaacagaaccttgaccagagacctagcgaagagaatctcaacaacttccttcatgatgggcaggagaccaccatggtgtacagcaatgcctctgcttaatagctcgcgcaggcgaaggatttgcggcagcgtacggtcctcgggctttaatcgagtgagtgacttttcaatgaacatgtgtgtcaaactcttctcgttggcattgctgaagtcttggtttgaaagtgaatctgcgttctcctcgcatcgtttcttagagaaaacgaagacacatcccggcagcaagtcttctttgcgaagatgcgaaacaagatgcacccaagtgtttttgtcctgggccgcacttgtacgaccaccaccacggcctgtacgagcgatgttacccgtgcctcggttggagtactgtccaccgctctgtcctcgacctcgttgcgggcctccacgctgtgggccgccgcggccgcctctgttattcgctggctgaccgcggcctcggccctggggagctggtgctctagcttgcgccgactgcgcctgagcttcagcctccttcttagctttggccttatctttgccggacaggatatcatccgcttccttccagccactctcaaggaatcttttgttggagtcgacgatcttgtgcttgctcttcccggcccagagatagtgctccagcgggacaggtcgcttatgggttgaaattacataaatgtccttcttctttgtacggcccacccaggatgcaaactcccgagtattgggaacagtggcagagagaagaatcaacgtgacatgctcgggaagcataatgatgacttcttcccataccactcctcgttcgaggtcgttcacataatgcacctcatcaaaaatgacgaattcaacgtcccggatgagatcagcacctcggtacagcatacttcgcaagatctcagtggtcataatgagacagctcgcttccgggttgatttgaacatcaccagtcagaatgccgacatcgtcgaattcggttctgaaatcacggtatttctggttgctcagcgctttgatgggagaagtatagattgctttggtcatatgcttagcagccaaggcgattgcatattcagccacaactgtcttgcctgccgaggtatgggctgcaacaaacaccgaatcgccattttcgaggtggtaaacagcctccttttggaaagtgtcgagctcgaatggccactctctggccatatctggaaccaactcattgaagttgggaatatccttgttgacatcgacaacgtgggcccattctctacctttttgcttgacacctgcaagcaactggctacgcggctccaacgccgggaactcaactggtagcaaagcgtcaatatcttcttcttcttcatcgtcgctgatatcatcaagctcgacctctgctcctaattcgacatccgcagattcctcgggttgatccaccttcaggtcactttcctcttggagaagggcggtttcgacttcttgggcaccttcggtggcggctttagattttgcttcatcgaaatcgataccgttatcgaagccagggggtgttgtcagaagacctccctcggtgccaaagttgatgatgcgatcgagtccagattgtttccccttggtcgattgttctgtgacctgagcatcggcctccattgctgccaaggcctcgatagcgtccaagcctccgggtgcgaacggaaagaaacctgcggcacctctgacaaagtcggcacgaccagcaggtcggcggagaagcgaggtggaattcttggccgttgcgcttgcagcaggaaccgtgacttcttgatatccagtgacgcgtccttccagtccctctcgtgtaaatcgcgttactgtccgtgtttgtgttggcgcgagttcgaaaaggtctgcatagtctgtcgaaacgtcccatcgtctgccaaagccgttaaaagctgccccgcgaatgaaaccaagatacttacttacttttggagagagttcaaccatttagtgctgaattggtccgatggggtcagaaactcattttcgagctctgttagcaactcttgcgcactctgaggggcctgcttccgagcttggaagttctcgatcttgccatcctcttcgtctgcgagacgagcatcgaaggtcgcggggtcgaagtgtctgccttctatgtctagctccttcattgtggaatcgagcgagtcggccatggtgtaggcaatgtatcggagagataagtaaaattatgtcgatgtttgactcggcagtagccgaaccccacaccgatatctgtatggatttcaagttctggcgcaaacacgggagtaattgtattccgacgtaaaaagaacaaatttaacgaatgaaattgattatgcgggtgagtgcgatagagtatttcgaagtgctttcaggcaacattatgtagcaataggctacttggggtaaacctcgctgagagaaactcaaggcggtgtagtccggcagtatccatgacgtcgatgcccaggtgtggggttatcgcatttagggctatgtgtactagtaatacttggccgcccatgcgggctctgcctttaataatccgatctatttagccgaagacgatatcaagcgcgttacatgtaagatcatacgatgtagcaatacctatactcgtgtcaggtttcgttttgggccgcaggccgctgtaacttcattgatcaagacaaccagcagccttcagccaggcaaagaaaagactgcagggtgaagacaaaaagaaatttacttatcatactgattccattgttatagctaactatttagtcctaaatccacctctcttatttttcgactcgttctgaggaagcacgatttggaagaatttcttgacatttttaacagcatacagctatattttcgagaatggcgatcaacaatcattttgatgagcgagttctgggttggcatccggatatagccggataaaatggccttttcttcaatttggacaagattgtattggcagaaaatatcaatatatatttaactttttgtacttcaatcagtcatacgaagaattgtgaatgaaagatgcaacaaataaaagggatagggatgaaatgatgtacgcccctaagcgccagaagggtatgtagtgtgagaacgattccatatgagaaaaggattagcacaacaagaatgagtcctgacaaggaatggcaatgaatcccttttttaaagtgaagactgtagatcatcctggtttagcagcaggtccgtcgttcgaagagattccggacctttgtgaaatctgcatgatcatgatcagaagaaaaaaacaagaaagaaaatcacagaaaagtaaatgagactcgatgatgttagataaataattcccagtaacgccaggcatggaaatttaacggcaagagaatttaggaaatgttttccgatcgtgaatgttcagtgagaattcgaaaattccctccagtgttgcgatgtacctgaaaaaaaaaattagtttaagcccgcaaggttgctgcattgcacactcacaatgtgcgtccatcagcgccccagccaactccagcagtagaatctggctcctcggcgccgcacccatgcattgaatttcgatcagggaggtcattgataatgtttctgatccagcggggagaatgtgtctgttcaaatccgagaagctgttggcgatgccgttgttccctctcaaaggagcggttgtgtacctcattagcaatctggcgctggcgccgaagtcgctcagcagcgacattggcacgaatctcatatgtggtgagacgtggattatcatatcttctttctgctccggtttgtggtcgttcgatgcgccggggaatggagcttgatcgctggggtcgatggttcaaaccattcgtatctagacttggattagaagatccagtcgcttcagctggaatgctagtttcgttgttggtcgtttcaggattggcagtaccccgatagatcatttctgatctgaggggtgtaagctctgaatgcgaggtggaataactcagggtgatgtctgattggcgatcatggtgagaggacgatgcttccgaaggtcgacgacttccttgagataccaccaccgagctctggcgtcttggattggatacagtgcggcccaaatggctatctcgggagacatcagaagaatcatagcgatgcaagggcgaagtaggacgatgggtgcgagtggcaccatccgtggaaccatgattttgcggccgagccactagttgaggtggaaggcctgccctagccgggcgctctaatcgttcagtaagtccttcttccagccgtgatgtccagcgtgccgtgttcaaaaactccataatcagcctttctctctcgctaagatcttgaatcaaagactcccgcagagacgaacgctccgtttgctctccattccgttcaatcgaaaaatcttcgttttcgagtctcactcgtggtggagtctccagaatatcgtctcctagcgggtgtcgttcgaggttctctgttgaaaagtccgtgtacacttcctgcaattgtggatcattagaatctaaatggaggatttgtctgcgcataaaatgttggcgaacgtcggccacaccagctctaccgtgaccctccagccatacaagaaggtcccatggttcgggcgaaaaggccatgcaacgaacggcaccgccctcggtgcatgatcttgatgccgggaattgacaaagaatagcagagtcgtcttcagagtcgccaaacttgtatatggactcaacgtcgataatagtgatgattccagattgagatccgatggcacacaagctgcttgacggggagaaagcgacggtgaagcagcacgcatcatccgcccgcaggccaatgttcatctccaggcgattgataagttcccattcccacccggtgagcttctttccagattcagttgtcccagaagattccaaatcacgagtgatttcataaaagtaggcgtgattctcatcccctactgccgtgagcagtttagagtccggggagattgtcgcatagttcatacaagtcggatgatgaaggaccgtcaagactttcgcgcgagtcaacgaatacaccgtgactgttcgatcattattgctattcatctgagtcagcatgatcaacgaaaccacaacccaactttccgaccagcgcccacctcagaaccacgatatcttcatccgccaagtcctcgctaccaccatagaaacgatggatggtcactgaattgacaatgctcccaccgaacccatggagctctacttcgggggataatcggctgcttcgatagcgggttgaagcagattcggcattgaaatcacccggagctatgcttgacggtggatcgagatcgagtgggagcgcactatctacatcggcatggaagggtgtatctccatggacctgcattccgcgatcaccgatgcgaatgaaagcacattcgccattttccgggccccccactactatccaaccatacccggcaaccagacagcgcggctcaaatgggagtaccgctacactctcgcgcttttgtgccgatatgtgtattgaatagacgattctctcgacgacgacataaatgcgatcgggatcagcagtactaatgtagttgcgaagctgtgtgtgactaaaacagagctctcttgggttaggctgcgcacggaagataagcgggttgatcaacgaacaagttggggatcttgaacgggaagaagcgtcgcttggtcggaaggatgagagcctcggttgggcgatgtctaagacagccacgttagaattattccggtagtgagatgcaccaggccttacagcagcgtagaatccgaggtcatggtggatagagctaagccagagataacattgtttgagcggggaagttaggaagacaagagaaacggggcccccgttggagtatgtcaacttgacagttatttaggcagcggacaccttgttttgtttcttcttagataaatttccttttggatagtctgtgctctgcagtgttcagtgtcaaactgcccggtgctttcattggatgacgtaatacttgggactgggacaaaaagccggggaaccgcaaattccaacgaatgcggtttgattgtcaccccgaaaccggccttgatcattcatgatgatgcattacactgtttatatctttttgcttactttaaagatcctatatactccatggtgcatagtgcataacatatacgtgttgcccccagtcccaacgatctgggccaggcattgtttccccccaaagtacggagtacatgaattgtcattgaccatctagatctaggcggactttcagctccattttcaatcttgtctcaggttcagccgaatcaacgaagcggagtttgccgactaggtcacacgacaccttgagagtatgactggttcagctactggagatacacgattttcgcaagtgttatgaggaagaaatgcttattgcgaccattctgtatggtatttgcaccaggccgtatacaatatggacctcgggagttcctcggagctcttcaatatttgccacacggcggaatgatgccattgaactgccactcctccgtactactacttgagatatcaggcagagtatgccgcatacatgattactatgtgctccgtaggctctactcgcaatacatccctatatccctaccctaatatccctacatcctatggcaatagccctatatccctatcctaatccaatacacctatgtcattgtatacccgcatatacggcaccaggcggtgagctcggttacctaggaggccatcgacaacaaggccatctctgattggtccgatcccgtgattctaccaagttcgacgggccgaagctctccgtgcaatttctatttccttcttcctttctcttcgattccatctctctatcttcatctcttcaatcgcatcttctgtccttttaatacttcacgattgaatcgctggagtttctctttttctctttttattaattaatttatcatcacaatgcttcctcgcacaattactcgcgcagtaagcttgcccttcttcccgaacaatcagcgcgtcacaggttactgactcaactctctctcagctcccgcgcgctgctttcgctcgcactcctgcctccagactcccagcctcattccggagatggaactccacagagggtggtgaggagaaggtaaagggccaggtcattggtattgatcttggtaagtactggcgcgagatgaaaatcatcaatgacgacagtattttaactttttattttcttaattataggtaccaccaactctgccgtggctgttatggagggcaagtcccctaagatcatcgagaacgctgaaggtatgtgagaagaaatttcaactccggacaagtggtcagagcttcggaactcagacttgcatccaccgtatgatgggcttaaatggaattagcaactaactcaactcttcaacaggtgctcgcactactccttccgttgttggttttgcacaggatggtgagcgcttggtcggtattgccgccaaacgtcaggccgttgtcaaccccgagaacactctgttcgctaccaagcgtctgattggtcgcaagtacaccgatgtcgaggttcagcgtgacattaaggaggttccctacaagatcgtccagcacagcaacggtgacgcctgggttgaggcccgtggccagaagtactctccttcccaggttggtggcttcgtccttaacaagatgaaggagaccgccgaggcctacctcggcaagcccgttaagaacgccgttgttactgttcccgcatacttcaacgactctcagcgtcaggctaccaaggatgctggtcagattgccggcctgaacgttctccgtgtcgtgaacgagcctaccgctgctgcccttgcctacggtatggagaaggaggctgaccgtgttgtcgctgtctacgatcttggtggtggtaccttcgatatctccgtcctcgagatccagaagggtgtcttcgaggtcaagtctaccaacggtgacactcaccttggtggtgaggatttcgatatccacctcgtccgcaacatcgttgccgagttcaagaaggagaccggtgtcgaccttaccggcgaccgtatggccatccagcgtatccgtgaggccgccgagaaggccaagatcgagctgtcctcttccctccagactgagatcaggtaagcatttccaattttggaacatcttagtaggccagtaactaattagtaatttttcgcacagtcttcctttcatcactgccggcgccagcggtgctttgcacattacccagaagctgacccgttctcagctcgaggctctggtcgagccccttatcagccgtactactgagcccgtccgcaaggccctgaaggatgccaacctccagtctggtgacattcaggatatcatcctggtcggtggtatgacccgtatgcccaaggtcactgagtccgtcaaggccctattcggccgtgagccctccaagtccgtcaaccctgatgaggctgttgccatcggtgccgctatccagggtgccgtcctggctggtgaggtcactgacgtcctcctgctcgatgtcactcctctttccctcggtatcgagaccctcggcggtgtcttcacccgtctgatcaaccgcaacactaccatccccaccaagaagtctcagaccttctccaccgctgctgacatgcagaccgctgtcgagatcaaggtctaccagggtgagcgtgagctcgtccgtgacaacaagatgctgggcaacttccagcttgttggcattcctcccgctcaccgcggtgtcccccagatcgaggtcaccttcgacattgacgctgactccattgtccacgtcaacgccaaggataagtctaccaacaaggaccagtctatcaccattgcctccggctccggtctttctgacgccgagattcagtccatggttgaggagtccgagaagtacgccgagactgataaggagcgcaaggccgccattgaggccgccaaccgcgccgacagcgtcctgaacgataccgagaaggccctcaaggacttcgaggaccgtcttgacaaggctgaggccgagaccatcaaggagaagatcgccactctccgtgagttcgttgtcaagagccagtctggcgagagcaccaccactgctgaggagctcaaggagaaggtcgacgacctccagactgccagcttgaccctgttcgacaagatgcacaaggccaacaacgagcagcagcagcagcagcagggtggtgagcagcagggtgagaccaagcagtaaatgcttttctttctatgactgccacacctgaaccgcacatggttactgtatttttctatcttcccttatgtttttcctttttttcagagactccctgatttttgcatctccttcctcgcatctacctgtacacatactttcaaggccctttttacccctttgcgttttctggtgtatcggtgttcaatctaccacacccatgtatgatcctatattcttttctcttctgcccttgtgtcactgttcaggttatcgcctggaggtggtcatctcggggttgtctacaattgtatctaatgacattacggcagtggggccacaaaaaaggatgtggtaggctttggttttcatgggcatgtgacaatagaaatcggacaattctcctctcgcttcacaatcattttccaactgtaggtctagttgcatcaatgctatcaacgtgcagtgcagatgtagttctcacctatctgcgagtgacacgcgccgttgggacatttgctcgcggatgcagagttgcttccggcttattattagtttccaactcaacatacatatgcatgtaggtacttgaccacaggcaaacaacactgctagaatctctatgctgcactctgcatgtacgccgatttatctggttaaagatgacataatgagcgttatattaagacaacactacggagtaactatggagtacgatatctttggatatctttcctccatgtttcagctcccacaaaaacgatgaagagtatttcccacggaataatggatatacatgctcggaaatataaccaaagcagcaaccaataaaagcaacggccaagctgaccatgattacgatgtacatagcagtgactattattgtccgaaatacactttaacgcatttaataagaagcagactactagattcccaggatcatgtccaccgcaaagtcaaatatctggagcgatgacaacgatgataggccagaagctcgcagctggcgcacgggtttcgacccttaggcccgccagagcgcacacgttgaaccagccaccagaaactgtatcgcgttccatcgcaccaatctattaatctaattctggcatctgggcctccactttgggaccatcggactgggtttcaagggcagcccatttggttagaccaatcgtctgtacggggcatagtgtctcatccttgcattatccacagagaatcaaggctgatttattcactagtgaatgatgggagctagatcgagaggggcgaggattgtaaggatgtgacaggggctataatcgctaggtacgatataacatacggagtacatacatccgtaagtagaagtaggtttcggcaagcttctattgtgtattgtgtcccttgtcctcccttaactttaacaatgcatgcaagttctgacaattgcccttgacatccatcaacaaaggagaagcaatacgagaaaagcaacgtcctgccactagaccaatctggactcgagtgacagaacgaagcaatcgtgcagtgcaggcttccctgcagcaaatcatcgttgtacacacttgttgggctgccacagtgggtctttcccaatgactctgtaaataattatttctcaatttctcattctaatccgaacaattatatgagaggcttggtggggattgaaatgcaggacatttgaaatagacaggggggtacttctgtcctcgattcggaagtatacgaacaatagctgcccctaccgatactatatcgaatattggattgtatgtactccgtctatactccgtagcaccgatcaccatcgcaaagtgtaagatgactcttaaattttaaattaaatctcggcgcaactagaaaaatttcaaacgcccacataacttccccctcggcgattcgtcgatcacttcttgtgtgtgagaccatctgcgttagcgtgcccctagtacgtatgattatttccatttccccactcggttgacaagctgtgttttttttttccttgttctacggttctcgtttcccttttttgtttcattttattccgtaggactccatacaagctcagccctggtgtttgttggagacccataactataatcaggaaatagaagataggactagatatgtggattttccttgatttccaatcctatttgttaaatattctgtgatatttatgttatatcgtaggatgttctaattacggagtccagaaaagatacataagaaattaaatagattgccagacaataatatgtggaggaccccgaatggagatgtagacgtgaggatatcccatatccaactccgtaattcttcccgcttctatggctaccatggaacttctcaggaacaagttctccccctgtgttacataatgatcgccaggatgagaacagggtagatctgttgcttctgattggactgttcattccggaattaaggacggagtaggaaaaattcaatcgtggaggctctgattcgaggctttgactatcgagtttagcttttagggtctacgatacataactcgcatactataataaggtaggttacgcctattttctccggggaaagctaagaaaaacagaaaacataaaacctgaatttctaaattgaccggattcccaatttccaattcccatttcccaattccctagattattagaccaatgacgctcagcagtaatttttagactggtcatgtttacgctccccctgaaggagatgtcaagtgacttccaattttggtcgatgtcgatcattggtccggtcgatgatagtctccattctgatccaagggctttggtgattgtgatttgattacatgctagcgttgtgccaattccatggatgggatttggtgggaaatgaatctttgctttgtttgatactatacagtatggtatacatactctatccctatcctatttactatattcactatactcctattcaacactatgatctatccgatcaatcacaatcctcccctgagtcgatcccttacgccgttacgggcattttcaagataacgggggtgcagaagggtcgagtggagtcgcttcttactttctattattatattatttgacatatattatattattgttttgttttgttttattcccatttttcccatgtccactttatcggtatagttagctcaaggtctgaatgtcaatcctttccaaaccgtcgacccatagatcggagatgggtcttccctttcgatccttgtctcatcctgttttcttttctttttcgacttctcttcctttgaacttcttcatactctcttcagcttttggtgcaggagggttccagactgtatcacctctcgcacctccccatccataaccatgaccactgcaccgccggtgcatcactctggccccgatagtggcatccccggccatctcgtcaaccatctccctcgctaccatcccattgccatgaatccaaatccacctccacaccagatgccgccgccggagcagatggtgcagagccaccatttccgccatttcgcgccgcccatgcatgaacatcatccgcaaggaatcccaccaatacacagtccagcttccttggaacatatcgaagctcgactccggcatctagagcacgaggagatggtccggaatgcaacccggagtcgcgtcttggcaatgcgaaagcatgaagatgaggaatttcggtcaatgacggagcgagccgaggcagaggaagaggtaagcgattgggatatccatctggtgaattgagattctaaagcttcacaggaccttcgaagacaacggaaaaagttaaagagagagtccatgggactgggcctcaatgccgcgggcgactcgccgcctcttcggcctacaccacctcgccgattatcagagacgagtgcagcaaccacattggcatttttcaagcagcaaacaccccccgagccccgtcaagaaccccttccatcttcatctcaggcgccgcctccctcaatgccgccaccccatatgcatgctcaacctcatcatcaagctcccccgcctcccccaccatctcagcatcaacacccaatgcttccccacgactcaatacaaatacacagcgctggctccatccgccgcaagcaaaaatacactatcaaaaacgtagaggcatggggcgaacgccacggccgaccagccgcccatgacccatccgggcgagcgttgtggaagagaccgtccgacggaagcttagtatatctcacctgcccgatccacggctgcgggaaatcagacttcgtcaccctacatggcttcatgtgccatctcaccaagaaacacaaagaccgcactctgggcagccaatcccgcgccctcgaagtctgcggtgtagtctacgacccgaacgctcccctcccgccagtcatgaacaaccaccgggcctcaacagaaggcagtcccctgggctccaatcccctggaccccgacggcgaccagcactacgaggacatggactcggagtccgaaggcgagctcgagcgcgagggctcctaccgagtcaagaccgaagtcctagatcggttcatgcccgacgcagagggcacccccattgaacccgctgcggcaacaccccccaagcacgcagccaacggatcaaccaagcagtccatctcgtccatcatcgaccgcacccccgaaacagaatccagagaggcgctggcgactcttccgccgtcggaatctggtatccagggtccgtcccctacatccaccgagtcgtctgtgccctcgaagcgcaagtacgaattctcgccgccggcggaaaaagaaaatgcggagccttagatggtgtgcggaataatgtttatcttcaatgtcgatttccgccggcaatacatacatacacctacataatttcttgagcgtctacgaatatcagcgctgtcgatatgataatctattgcatcatgctcttgtatttcttgtgtcggttagatgtgcttcgggcatgtcttttctcgataccctttcgttatatatgggttggttttggcgtcttctattttatttgaacatactggctcgaagctgtgcgcattaccatataatgcttcatagctagctgcatactgcatactgagcatttcggagtttatccatgcgtcttttgtctcgctgtgaatcacagccgctgggggtacaaaatcaggagattatgagagccttggctaccggaaagtgctgttcgggtcttctgctgctgtaaataaaactgtctcgagatatcggtaactccttgctatgtatatagtacacactcataagcacaaacaaatcaagcacctgttgataacatcgcaagcttcattggtggtctgaagtatgtttagtagttcgtggatctcatctatagaggtctgaaatccagactcatattcatgttagtccgagtactcttcaaagtccctcaagttgatcccgaatgttgctctaaacaatatagctagtgatgaccatctgtaggttgtttctgattttagtatgggaaagcctcagcctaggacagctagctatatacagtactcccaagataggtatgaacaaagccacctatatgtacttctaatatatctacatctatatgctatctatccctcaccaataacaaatgcaccaaatatccagacccactcctcaatccctccccaagcacatcatccctcaacctccaaacccgaaactcccgcatcgcctccctaagccaagtctcaaacacatcgggcgaccgctgctgctgcgcaataatacaaaccgtcggtctgcggcgctcccgcagttccccagactcagccacatacgccggccggagtcgacatagctccgcgcaggtgcgcacgaacggcgccacgagtgcttcgttgtagatgcagtcacaggaaagcaggaggtcgaagcctttatcttcgtctccttctccttcttcctcgccgtgagtctcgtcgagatccatacattctttcagagaggcggcctggtcagtctcccagtccagggttgtgaaggagatattagtgacaggcttggcggtcgttggttttgattttgatttggatgccttgctcttgctttttgctttgctgttgttgttgctagagacagggacggatgcattagcgtcgagattcgtgcggaacaacttgcgcacgtattcttggtctgtggcgatgtagtggcgtacggagggggctaggacgagcgcgactagtgcggagatgccggtgccgagttcggctactgttgaggtctggctgaggagggcggttgtccagagcgggtttgaggggttggttatccattctgcgaataaaggggtgattttccataggactgggtttgtagggttagtattggtttaatttcgggatggatgatagtaaatcgtcaaagcgggtggtggttgtggatcagtcgggaagtcgccaaggtatcccgaggtctgagcaagggaaaaaaagggtcaaggccaaggctaaggcatagcagggcaggtgacaattacactatgaacctcgtgtttggggtagaaaagcacagtgtgacagtcaccctccccgagagccgaggcacagacaatcatcggattggacaattcgacgcctcgaccctcggcctggtctgggcatcggactcgggtaaatgacctgcggagtacggagtagtccgtgcttgggtttgctggctctggggattccggggacaaatcatagaagaactggtgtagatcatgcgagctccagtcttggtgaaccggagtccgtacttagtacttaccggcgcctgtagttcctcccgcacgatgggaggagagtaatgctggtgattgatgaattatgtattcatggtcattgatggagatttctactgatggtgcacggggattgagcatccccaggttgttgcttgggatgtcctgcgcgaagaggagaaatgactctatagtgagtttggtgagtgactgggtaggtttggggtatcgtattcggtggcgtaccctcatccacgtcaatgacctcttcattggcgagtaggttgatgagttggtccatgagttggtatctatggatgttatatggatgttctaatgtttttatggaacttttatgggttgggtagcacgttaagggatcacgggaccaaggcatataaattggatattggatatgaaatatacccagaatacaatatttatgccaatcccagtgcttctacacttcgtataagagctatgacttgtgaagaattgttgggaaacccaacagaaagggataacgggacctgactgaatagtaacttagcgcttatttatgcaatttcgacttatccataacaaaggcttaatttcaagaaggaatcaactgaaacatattaaataaaaacaagactccgtgcgtggtgaaaatcccaaagtcccaaagtcgaatatcaacccgaaaaccttggacctcctgcgtcatttgccgaccagccacatatccaacctgccagggcccaactttctcctcttccccggtgaatgctcagttcatatctcattttaataccccatcttctttcttgacttggtaagattctattccaactcttgttctaccccgtggcttgttacagctcgtgtgctttgccccttcctagctccgtgctattcccgcactagctaaccgccgtccccatcgcgtagaagatctttttctttaaatatcctcgatacccggccccttccgctttccctttgagcgagacacacagtcaacatggcgacgcaaaacattcacctccagccgcgcatggtcaagaagggccctttctcaatcgaagcgcccggatatgagcccgtccccggtgagacaatcccacgtcgacaccccaaggccaagaacggcctcattacgaccctcgaggatgtctctaccacttatgagaatatgcgccggtctgctcgcgtctttggcaacgccaaagctgtcggcagtcgccggctcatcaagacccacgtggagaacaagaaggttaagaagatcgtggacggtgttgagcaggaggtcgacaagaagtggacttattttgaaatgagtggttatacctacaagagcttcctcgaatatgagaagctgtgtctggagcttggttgcggtctccgtaagctgggcttcgagaaggagggcagaatccacctctacggtgcgacaaggtaagacattgcgcctccaaagagattcggagccagatgactgacttgattattcttatagcgcacactggctggccatgtcgcacggttcgttatccctatttccatgacgcgaacaaacccactaacctactacaggtgctgcatctcagtccgtgacaattgtaaccgcgtatgataccctaggcgaggaaggcctaaagcactctatcgttcaaaccggtagcactgccatcttcctcgaccccggcctgctgaagtcgcttatcgacatcctccggagcgtgcctacaatcaagcacattatctacaacaccgacacggaaatcgaccagaagattcttgatcagttacacagcgagtttattcacatcaatgtgctgagcatcgaggacttgcgtaagcagggcgaggagaaccccgtggagcctgttccccctaagccggaggacctgtgctgcataatgtacacctcgggcacaacaggcgcaccgaagggcgtgccattgacacacgccaacgtgatcgctgccagtaagctggaaagaatcctccgaactgtctattaagctaatatctcgcaatagctgctggtgtccacaccgtcatcggtccctgtatcaaccacacggactccctcctgacctatcttccccaatcgcacattctggaattcatgttcgagaacctgtgcttgttctggggtggtaccatgggatacggtaacccccgaacgttgtccgatgcctctatgtggaagtgcctgggtgatatcaaggaattcaagcctaccgttctggtcggtgtaccggccgtgtgggagtcagtgaaaaagggtgtcttggccaatctaaacaaggccagtttcgtggtcaggggtatgttctggggtgccatggcagccaagagtttcctcatgtccaccggcatccctggctcaaacatgggcgcctcaattttggacgccgttgtcttcaaaaagctgaaggaggcaaccggaggccgactccgtgtcatcatgaacggtggtggccccgtctccaaggaaacccaggtgttcttgtccatggccatcgcccccatggttagcggttacggtctaaccgaaacctctgccatgggtgccctgaacgaccccttggcctggaaccccaatgctctaggtgaaattcccgcctcgatcgaggtcaagcttgttgacttccccgatgctggatacctggcctcgaaccacccccctcagggcgagattttcatccgcggtggcagtgtgaccaagggctacttccacaacgaggaggagaccaaggctgcgatcaataaggatggctggttcatgaccggtgacattggcgagttcgaccccaacggccacctgaagatcattgaccgcaagaagaacttggtcaagaccctgaacggtgaatacatcgctctggagaagctagagtctgtctaccgctcgtctcccgtggttggcaacatctgtgtctacgccgccgaggaccaagacaagcccattgctatcattgtccccgtcgaggcggcactgaagaagattgcccacgagaacggtatcgatggtgacaccatcgagaccctcgttcacaacgaaaagctcaagacgatcgtcttgcacgagctgcagtccgccggccgcgcgggtggcttgaagggcattgagattattaacggtatcgtgctatccgacgacgagtggacgccgcaaaacgtaagtgattctcaagttatctggggctcgaactctgctaacgagacattagggcttcatgactgctgcgcaaaagctccagcgcaagaagatcgtcgcccgctacgactccgagatcaacagggcctacggcaagaaataaaagcgtgtcaaggtgcttcattcactggatttcgcttcgcccttgtgttttttattcctattttatttccctgctgtattgcttgcgctttgagaccctctctgttattttcactgttcaatttatgattatctttcgtgactcttgctcttattgatattctgccacgatgaagatgatatagtaatcaatgtgggcatgaaatgatcggcatcacgaggacttagtctatcgtaaattcgtaatcgacatatgggcctcgtattctatagaaatactttttgattggctattctcgcacccaaagaggtttttagtctaagaatgtcttcaatgatttcatttacccggccagctatcatacatccagcaagtctatcatatacacagaagtacaagcatgtacgtagcagtgctttgtccgaagtatcccggtacctcatttatcagccacagttacaccaccccccagcaattcacaagtatccggggttgtccatgtacctggcaggacttagcggcagacaaaaagacacacgttcgaacccgtcgcactggtacagattgaagtatagtcatagagttcgctagcctcagttaccaagcaatcccgtgaccgaaagtgtagatatctccacgtgactctctgtccgttgagtagcaagttgaaagtcaagtcacacattgcccccattattgcctccctccaagactagaataatctcattcccagtccaaatgtctctctggaggtacgtgacacagctctaaaccgaccaaccccggcacacaccaacacccggactaccgaggcaagaaagaaagtcaagaaactaacaagcctcacagctcctaccgcggcctcgcccccaaaacccgggccctgttcggtatcggtctcatggcctgggcaggcatcggactctggaccacgccccaggtagaaaacgcattgggcatgcagcctacgaaagaagagcaggatgcgctggatcggaagttggcggtgcgcgtggtgcgtatcggaggggaggaaggggagatatcggataatcgagcaaactgagcaattgatgaattcgacgaagacaaggcgcgggaatggactctgggagctcatgtgatcagcccatgggctggtgatggcgatgggctatggggtgtgctttgtggtcggctgtgattatctacgggagtcatgggtgcagtctcacggaaccacggacttgaacgcgactggtcaggaaagggagaagagggaggtgaagccagttcgttgcagactgccgggctggtacggaaggaagtctttccctggggtatttttgttgagtcaaccttcctccagaaactcaattgcaattgcaattgctgcattgttgcaattcgctgtgcccgtgtccgtgccagacgtctaaactgtctatctacataccgcatctctatccatccccccaacgcatcgggactccgggattcaaaagaagacccggttcggagccggatggtcacttactatgtacctacactggaaagcggtcatagcgaccagtctgccactgtttgtctcgtcttcgcgtcccgccaagacaaaaaaagaaaaacaagcaaacaagcagtgctcagtggctagtggctgacgccccccgttctcgatgtccgacagacctgctatgcgcgtgcacgtcctcatcggaaagaccacagggaaatcattccggccgtaccctgtctttgcccatgctcatgcccacgcctgtccgtgcggctgcaacgaccccggcttccactgctctgttcgcagcacagagaagtattgggttgctgcagtcagcggccgtctttccctgcctagcctcacctcgcggacgttttattatttcctttctggggcattggttgggcattcctgtggctcggaagatttactgcggctgagagggtggatcgttgcttagcctggcccggatcgtgacatgttggttcttgtggcgaggggccaattagaggtcgattttaatttccgacctttctcttttgtccgattgggaaagtgatgcgaggggcagtttgtctggttgggattgggctttactacgattgtttgtttgagattttgggatctccttttctagacttcggtcatggtcagttcgtgggttatttggaatatgcgtgtctaggttagcttctactctagttatcgaatacttgtcgcattgcctagatgggacgtcttagggtcatattgttccaaggtaatgtgaaactattatcaaaacacgttatatcgataagtctaaagcaacaaacctcgtcggtatacaatcgtagtgcggctccgaagtattgtttcggaagttagttctatgattttattcatattgtagcacgagggacctctttacccttagaagaatcttgtgcatcccaaagatcgatgctcatcaatcggggtaatcggagattcgatccatagggactcttcgtcatgccagtctcgatagattgttttcatctttattctattcatagatgccatgatctcatccaaactcgtagttagctccccgagaaagctattttcaaaacattacctcggatctacagagcggtcatgtgttatttcgggtaggacacgactagcaccatgctctggaggccgttgaggtggaacacgaccatgctccttcgatggctgatagcaggtaaacactttagctgatccatagctccatctggaagaaataaccaggtacgttcgaacatacgtagaagctagcttcctagctcgcaatgcgtccaagacaagcggcgagagtttgtattagagcagctgtggcatggacagggttttttcctagtgcagtagcaaaatcgatcgcggagatgttcatgcagagatatcactgtccatatccgtctcttaggcaatagagatagatatcttaccaggctaattaggttaaatatcaagtcttcagacggattgtcttatgggcgtcttggctcgatcacggatagggttgattatcgtcgtactgacaacccggtgtcctttacttcaggcttgtgccttgccgctatagaacgtagtctccttgcttttactcttgagctttaaatgcagttcccgggatttgttgacgctttttattggtgctttctgtatggatattccatgctagtaaactatggtcgatctcgcgtggagatgtgaactctatgccagtcctgcgatgtctgatcttcagaggattgtagattatctgcgtaggagcaggagtgggaagcatagcaatgtaacctacttgactgtgacgatagagtagatcaataagattaaaagatgtagataagggcacatatacggaaataccatgaagtatgaaatagtggcaacacaccaggatatcaaaatgcccagcccgaccaaagaccatattaggagtgtcaactcaaggtgtcgaataagaaccccaagcgcctaggattgcccttttgtctgactccccttgtacgacgtgcagaagtacctatccaaccggtcatgagtaaacaaccaatgatattagacctaccccaagtatccgagcatttttctcaggaagaatacaaaacatttattcatttcccttcggaatgggaaatatacacccctccagtggcaaaaccacggtatataccaacgagacttggcacaaaagctggacttgaacccaattgtttcagataaagtcaaaaatagtctaattctaacaagaaaccctcatgatccacatacttactatatctctcaaatctcttaccgcatgcggatgtaaggtttctcccccggcccttcacaggggatgttattgacaaggatccgagtgtttaaaacatcggaatatgccgaggtgcagcgcggcttggctgatacgagggtatttctcctttggataatttaacatgagacatgaacaggtttcattggagagattggatcttttactttagcataccgtcgaactgatggtcacaccaacgcctgttttgtttcacctgatatacttagatagagataatcgcatgttgaatttatagctaatagccagacagggctaagctgacatgtacgtacattgtcatgaagcatgacctgcactgctgccgatcaggatctgcatctaatgatttcttacatttaataatacgattaaagtgaaatcctttatactaccttgctataaatctctgctgcctaagaaagcaaaccctagccctctcagaactcaacaaacagactgctccttaactctccaattggctcgaaacaccatgatccattctgcatgtaaccgtttctctcggaatatctgcacgtacaccgtccacgacggaaatagtgcccaccttgcttcgtttggttttcaagaccggagcctccccaaaaagcaaaagcaaagaaagtgggaattaagtaaaaaagaactagtaatagcgccacaataagccctttaatcttgcatggccttttaatgaactcaacccaatcattcgctcattcccgcaggcgaaatccatgtttgcttacttcggcgggcgtcagtctatgtagtcatcagacacgaaaaaaagagtcctggaagcaaattaccgtaggtccttgcttcaggtttgattgggtagttgagtttgggagaggtaaaaaataaaacaagtcaaacaaaacagcagaaaaaaatgcggaaaaaaggcaaaagcatcaaggcagagaccgcataagtccatatccattgaaaaccggactggcagccctgtaatagatgaagaccaggaccaggaccgcagcaaataacggttcctggctatgaagagagcaaatcggggagtttaggggtacgcctttaatgtttgttttcgaagatttgtgtttgtactataacctagctttgttgtgatattgtctttgtaccaatacttagacaatgctaattcaactctcattatcggattactataatatcaagtccagatcttaatcaaatcggttctattcgctagcatattccgacatttgcttttgaagacagtcttaatggcattctgtatgctttttctccgaggcagacacatgaaatgagacagtatctcgagtagaattggagcgaatcaaaagagataaagaatagatcacaatgaaataaacaaaggccactaatcccactagcaaccagatgataggaagaataaaataaaacaacgaatagaaatggcctcatgatcccccacgccgtcctgcaccagtgcataaccccttttccatttggtcgtatcgagcatgataaaaagagaaaacacgagaagaaatcgagataattcagaaaccaggggcaaaacaaaggcacagcctaagtacatagactatgcgaattctggatcggatcgtaacggctataattcgttgagtagacggggtcatatccaccagtattagactggcgatgttggtggggaacccctgtgtaggtattatcctgatatggatctgatttgaggtaaaggtcagacttgattgtgtccatggggtccatagtgtcaatcattgagtactcgaacccagaggaagacgaagaggagatgagaggactgtcgctgagtggagaatggtctgtaacgttaattttccgatgatcggatctgccgtaagaaagaccatttcgatgcgacgtgtcgtacacgagcatgtgggaacgacccgtttggcccagcccatgaggaatgacaccacaggtgttgtctccgccagccccatccggacccatgctaccagtactgccacggcgtccgtccttgtagtgaccgggtgaacgtccgcggacgaccagggggtgggagtggcgccgggcgatttgtacccactcagtttcacctgggaccgagctagcaacctcagcgtacagttcaacgaccagattgtaatattgttgctgggcacggcgcttgccattgttggcggtcgctttctggaattggatacgttcgaatacgtgggacgttggaggctgacatggctgaggtgtccccgtgaaagaagggttgtagtccatagattgcgagccaagggggaatcccgagagacttccattaactgttgaggttgatgtgaatgaaggcggaggtgcaggctgaagaatgacacgacctggtttgcgttcggattgcttgtctcgctttggggtgtgttgaacaagttctcgagtttctccatattgaccgttcacgatagcagaaatggccattgaaaatccacggattggttcaagggtctggtcagggtagcggatgtatagaggagcattgggaggccaaggatgaaggccaaagccgcaggtcaccgcgaagtagttgcggcgatagcaagtccacttgccctcagccggaaagggccctcgacccatttttgcttggacatctggtttcaccgtctgatattggccaccaaactctgcaacaactgtatgaaggatagtcgtgtcgtcgaaaggcggagcctcaatctggggctgtgagcgttgtggggactcgactatcggttgctgatacatattattctgagatcgatccatcccgctgtctaaggcgcgtggagtgcccggatacccatgacgggaaagatcgttcattccccccataggcaagccgatatttccaattccgcgctgtaaagcgtatgaaccgtaggaattattgcgccccatgagtgccggaatggagttcaaggcatgccctgagctctgcatccccgtaggcattccagttggcggttgactagaggaaagatcagtactgatgaacctcatccacctttacaggagcgtaaagcttacagcgctggcacccgttgatagtctgccattctatcaaagggatgctgaagtcgagagatatgtgggaagaggggaccagacgtgggcgaaaatgagtcttcacatcgcaatgtatcagtcaaaggaagtctctcgggattgaaagtaagaaagggcttaccaggacaagagtctggcggagtcattgcaagagcacccgaactagaatatctaaagtgaagaatggctcagtaacagctcatcatggggaatccacgtgcgatcgcctgtaattaaaacagtccagaagatatcatatgagtccgggagcggcacggaaaccatgatgcgtaaaaagacaatggaaacggggggcgggggcgaaagaggcaaggacctcaagacacggcacgagctcagatgaaaaggacaaaacatcggaagaaagacatgcaggcagcagattggtatggaaggtaccgaaacaggctggactgaagttcaagctgcccggacccggaggaagcgcagcgacaagggggtcgagaggctgaccgagtggagcgcaagggcaagtccggattgaaagaatggaaaataacttactgtaaatcctgcatcaaaggatgctgtgcgtggtacctcacgccgttggtgtcaggcatggagacgagacctccgactcgctggctgttgtcgtcttcgtccgttccaaaccctgtcacatgagagttcatatagtcaccctccgaagtaacgggatcgttcaatgagaatacctccgagagaagtgctgagaaattcataggttagagatgaggaagatatatggggaagagaaaaaaaaagaaaagaaaaagacaaaggcaagagaaaacaatgtcgatgtcgaatcaaccgcatgacggaataaacagggaatgaaaaagggagaagcttacagggattcatcctgagcgtgctgataccaggtgcctcgaggaccctgaagtttttggtcaatgtaacaccgggcgagacgccaaagctgtctggcccttgaggtcttgggtggcaagaacttgatgtctagaatagcaaaggttaggtaaacacacaatcaaattctctcacagtacttgattgttacctttgacgtctggatcactcagaaggtgggtgctttgagcctatagaggtgggaaaaaatcaatacagctcctcttggtcttggagataaaccaaaacacaattctcacaagaagttgtttggaaggcaagtagcaaacacggagtaaagggagggtgggggagaaagaacgaagaagtataaatgaagataggaaaggcctttgggttataaagtgagcgtgaagagtaatacaatatagtatgctcagtagaacggtgcgtaaaacggtgcccttttcgatgttgacaggaagtagatgatcgtccgggagccaaaagtgcgtcaccggtttatagacatgacttcctaattgggcgatctcgcattaacttaagtcataggtacaaaagtacaagagaagagtgttggaatcgatcgggccagaacttatagtgttctttgcaaagatcttaaaggagaggggggtatggagaaagagaactgtagagaagaattagcccaaagcgagcaaaaagccaagaatcccagaaagcacaataatagcaaaatagcaaaatagcaatcgcaggccaacggaggggcaacaaaaaagaaaacagaaaaaaaaacaaaaaaacaaattgaaaaaaaaaataatcacagaaggggaaaggaaaagacactgatgtaatctggtgtgacagcctggggacgacgagcaaataaaaagctcttgtcccggcacaaataggtaagtatcttggtattgcagcagggtacttccacttatgcaaccctaacttggtatttaagaacggccgagcagatctggaggaatcatctcttttgacaggttgcaggaagtagatatgcgcttacctagttgtatagatgtataggtatagatagttgtatagttgagtagttcgatatgagggctgagaccagatgtatgtgattgactttatccccggaattaacaaaaggttgcaattggtatgttctacccaatgaagcttccggtctatgatattgtctagagccgttctcgggattgttggaggatcattagtctatcctggtaaggctcagggcccactagtgatggtctagccgagaggcgactataaccacgagttggatctgccagggacagtgaaatacgctgtattcggtaaggctccaatgggggtggtggatttgcataggggtccaaccataatcgaaagatatccgggttatcattttctgtgtatgatctctgtgggaaaaaaaagaaatgaacaattttctttttcctcaatcatttgtattttgaagtcaggatttggaattttgacggggtcgagcgcaatgaggagagtagcatcaaatcatcatcggctccagacagtttgattgttgaaggcgtatggcattggtcagaacaccccatgtccacgggttgcgtgctagaaggacccgacggcggctgcacggaccgtaggtaaggccggtacgtacacgttgtatgtgtttttcattacagataattcccgatgggatcagatgtcctagtgcgaatacccgacagacgggtcgctgcaggagagcgaaataagatgaaactagaaaggatagaggagatgatcgacctccgggatatgtaactatgcagacccatgacagggacggttgatgtatcagacttggaggaccccagaccaatgataaaaaaaaggcgaattaaatatgagaaatgaccaaatcgggtagaagtcctgaccgaagtccgtaatgtttccaaggtctgtcggagtagttcccgtcatatttaattcttttaagccgtaagaggctcgaggcacgagctgcggttcttgcatgaaggaactggacgatcatgcgatcgacaagttccattaagcatgttgcattgtccatgttggcggtgttcacaccgacagaaccggacctgggagagcaataaaaatagcacgttcgagacgatgcaccccaagatggagtatatctactccactccgaaagagagattgttctggtagcggtttctcttgcggcgcgaaaccgtgccctaactgcagacggggggtctccagtctccactagagaggctaaagcagctcggtggggtatacaatgattgcggtccgtacccgggagccttttccagaaatcgagcggcactagtcccaccgttccgtcaatgaaacgtccagggaactggaatagattggaaagatcctggtctccatgagtggacagtcctgatcgtgtcgacagaactgcattagtggctagaagatcgaccatcctgcaggaggctgggtgagatggcaaggtgcagtgaagaagcacccgcaagcttgtgattgggtagggtagataagccgtatattcgatttcctcagtggttatggcgggtatgttgtgcagctattcgcccccacgggcacataagaccgtgtgggtaccgaatcggtagggagtactccgaactaggtgcaggattgattacccgtaccaaggtaataaagtactgatcaactataccaactttcagaattccaagggagacaatagtgaacaataacatatttctttttgactctggggggtcagccccttcccggatgacggggctgacacgtgcaggggcggtgaactggacgagatttatgtagtaggtacgtgggttttcatattagattagtggataaactatgtaccatgtacttgtgttctgcctcctattagggcagtgcagtaattgttgatgcttaaattgatatagccagcatacatttcattcgaaggttaggtgctaaaattagggcccaggggctatattcctagttcgacattaggcgccaattgaaatcaaataatttgtgcaactaacccccccggaagacactatcagatccatcggtccacccgtgaactctccacatgtcacttttcgacatatcaactcactctacttgtgctcaggtacggagtacagaactatagatacaggaaacgaatgcccgcaaattgtccgatacggtacgtccagggctcactgcaggtacctcgaagccaatgccaataatttgactttagaaatgcatgaacccatctatggatgctctcgacatggattagccccagaaccctagaagccggaaaactctgacagcttgacgttgcaactgtctcagtccatctgtctctgtttcgggcacgtgccatctaccgagtctgtcctcccaatggttgaaatctcagaaaagaaaaatatatatattcccgtgcaacaattcttggctgcacgtcaatggcaaatccaatgccatgcccttcattgctggttacattcgggtgttcgagcttcggacagggggcgcaaagctacagctcctgccaacggtagagaagctataaccacatcccggagtcgggattgctgactcaaccgtgttattcgccctggagatcagaaaattcaaatccaaaaaagaccattggccaatctcaccagcgtacagatccagagtgtcatcccagacggttatctccccgggtcttgctgcctcagccccatatgcttgttgctccaggatctgaggatgcgacacgccccatggacccataggccatgtccaatgcgccaatcctggtcgatggggtctagagttcgaagtcttgcatgtcggggggagatattcctggacgatgactaccaagtaaggaaagagtcggcaaatcctcctatccggagacaatcctgtgaggcttttctttctgccttggtgattgagacagattaaagttttactttaccaacggccgcggcctctagggcttccatccccgagacatccaccggccttgtccgggcgtaaaaattgatctacctaattctaccagtatcttgtaccatgtcaagactcataccatgtcgagctagcacattcaaggaaaatggtatgatttccaaactaatttcccttactcgcatccatggagattaaacagttcaggcctctatggctccacaattcagcattgggtcgcctgggcacaaggttctgtgatgggttacctgtgtatcacttcttccgagattgatggttactttcagtgaaagtagacccgagtactggtggcctactgcaatgggctagaatgccttgctgtgggaaattgcaagatcagtccaccctgcttcgccttccctgtccgcgaagacaagagtttgccccgagaccaggatgatcattggcagtttccccaccctatgatcccaaactttgatcaccctggatctacagcccgccagcacagatcgtatcacgaccacgaagctccggccagaaaagttccatcaacgtctgagagtatccgaccctgtcggcgtggatggaacgacaaggcatcaaccagacaaggatgacaatggacagaagggtgtttgattggttcgccgccctccaattctggaaacgaagcttgtcaggcgaggaatatgctttggatggcgtgggatgcaggccagttcaagactccactcatcagccagcagcccatccggccgtttttttgcctccccgtggcaattctcagcccttgacaatcatcctgcgagtagctcagccaaccccaagccgtgccggtgtagcacggaggaacggccaagacaaaacttgctcaccggccgaaacgctcccagtgaagaactgcccttctggtcaaactcctcaagctaatataagtgcatcatgttgtttggcgccgacattccctgcaaggtcactaagacttcggaacgtcacgaacgccctttcacatgttgatgcagccgtggaaaagtggcagcgccagaacacggtgggctggtgagcgttttcgagagagccaaggccaaacctgcagggagcaacatctcggcctctccactgtctccgtagccccgtcttgtttagtatgggggaggccttcggcgaaaagccggacccgtaggtaagcttttcccacatattcaagtctctttcctaaaagaaacaccgatgctacgttatgcgacccatcccgttaccgggaaatttaacacgacaactgttgccgccgaggctgggtctgtgtctgacttgctgagatctaatatcgactgtactttggtactttggtgattgaccctgggatctggcacccgagcgcgtagctagtacgtagttggcctgaagctagggcacaacaggaaaaaagtccaggttgcccgagctccatttccttccgatgtcatctccactgtcatgcgaagatgcagaaaatttgatgtcgaaatgcgatccctggagccctttgaaaaatcgaacagtcgagacctgcgacgtttatcttccagatgacagattcgccgtcaacggcgtgcaggattgttgtcagccgagtccggtacctgggcactaggtgtggtggctaggagatggagatttgtcaagcctgaagccagcggcgagagagcttgcaaagagcagaatggccttggttggcatctactgttatcatgttaaccagtttgagcttttccgggagaatttgcacattaacatgtctagtggacgttcaaactgcgtttcgacccaacactgatgttcatccccacgcttatccgcacgccgaaaaagacctgaaatgctgggcaatgaggtatgttcgcagaattgcctatatattgttttgagacatcgtccgttcatacaagcacgggttgatttccatggacgcttgagatgttccatggtagcgtgaagcaaatatagaacaagtgcttcgagaaggacattattggaagtaaagaaacactaccagggatgagggtacgaccgtaaaataaccaagaaacccatgtatgaagttcaaaatttctctaacccattgcttttgtatcgaccgacgaatataagtaactgacatgcttgatgtctttttgggaatcatcattatcaaccaggtcctacagtacaaggaaaagagcttcggcccaaagataggcccgcctgagaagaaggaaacgttccattcaaaaagtcgtaagagagaaccgagaaagaagtttaagtagtgcgcttggcgaactcgacgcggagaataaggtggcggtaaccgactagcagaagaacgggttagcactcgaggaacttgtaaaaagaagatcacgaatcggagcgttgaagacatacagccatccaccttctcgcaagcaagtgctgcgtcgccacgatccgcatagctgatgaaagcaaagcccttggctctctgggtttcccgatcccgtgcaaggaaaactctggtgacacgaccgaaacgctcgaagagatcccgcaactcgttctcctctgccaactcgctgacctatttgaaaaagtcagtaccgaaccaagataaacaatcacgatgctcgtagagctcatagagctcgtagatagcagaataatggcagaacatacgtttgtaactctcagtgtcgccaaatcgtccttctcgaagcgaccacccatcttctcgccgccaccagcaccgcccttccgcatgtgaggaggaacgtagctggactttccagcaccaagaccacccgcatcgtcctccgcctcggcgccaccagcagcagaagtgccctcctcgacgggggccatggtgtccttgaagggacagcgagccgtgaaatgctctccactgcaaatacgacacttgaccttcttgtccttcaactggtccttcatgctgcccttctcgggaccctccttctcagcctccttagcattagccttccagttgacgctgggtcggaagacgatgttctcgccgacggaggtggtgtcgaatgagggaccggcggcgtggcccttctcgagaccgaacttgtcccatttgcggcgttcggcgacctgagggttgacgtgttcgcggacaatagtggtcttaattcggcgggtgaccttcactttcttgttgtcgtcattgtagcggtaggaaatgacggtcttggtgccgtccttgttcgcgatcacttcttgcggcgggagcacggaggggtcatcgaaatcttcgtcgtcggcccagtcggcgcggctgtaaaatagaaagatttgttaggccggtgttttttgtaggatgcaactgtgtatactcacttcccagctggagacatggtgtaagtgatggtgttattacggctgctgaatttctggatttctttcaaaggcgaatccgttgtggatttaataatttactgtggcacagctgtggctggtggcggaaatcacgtggcgtggttccaagttctgttgaacctcgttctactctccgataaacatgatggcattcagcgagtttcattcccttcaaacagagtgaatattcgcagtggtcagagaatttattcgccctcattccatacttcattttgtggcacttttcctatctagcaccgagcatagcctcaagcaaggctagaatacgctccctcgatatgcctagagccaaaaaatgacacggacttccattgcttcctctaaatgatccttctatgtacgttggcttgtcagttccagataatcttatagttaccatacagactagtcaccacatggacacacaaaaacccattgtggagtatatactcgcaaataatatcaaagtcccgtttcaaaatccttcaaacccttcaaatccttcatgtcgtcttttgaaacgggattcacgatttgtatctatgctctctatctcgattcttcagatctgacaggagctagatagccacctaccgctgcaagccccaagtttggtgttgatcggggcgaaattatgtgccatgcttgagaagcgtttttcataagttcatgtattcactcagatcatcacaaggaataatcttacttagaaaatacgacaagacaatgccactcgagtactgttatatcgacctcttactcttaggaagtctagcatgcatgaatacatcatcattttcttcccttgatcctcactggggggtgtaaggagggaatgaaatagtcgccaagagcactcgtgattctctcatatcgctgcttccaggtgggatcggtctttgctacagtggctgtccaggcaaagtagtcccataggatgcagatcttcttactaggcataagaagcctgaatacgccaacgacgtaatccgtaaaaagtgccatctcccagcgagagcggatcatcttattgatcctccgttgttttttgctttttgcttgcgaactgcagtttttggcttggctggaaaacgcggtatgcactcgttccgccaaaccccccgtccacccacctccaccacccaatcctccccatcttcctcacaggaggtgtacgggcttccacatcatcccctgcatggatcttctcgccggtcccctctggctgctcgccaacaatgatatctttcaggctattttacgatatattagcctctgtgcatacataggcaaagatccgccaatgtagtttccatgagaatcgtgtttcaccacttacggggtatcctcaatgtcctcgctcttggaggctggtctcctccaaaaaaaaaaaaaaaacaaaaaatagccggtgccagcaaggcaccagctatgacaatcatgagggcccaaaagcctggcacggctaccaactgttggctcatggaccgagaggtcccggaggtagaatctctggagcatgacacagagatgaggcttcccatgctctttcttaatgaagatagagtaatcagaatttgtaggataaaccccatagaaatcagtacatcatgaagtcacagataccattctcggggactttgcatctgacagacggatatcagctggtggaagttcgaagtcgccgtcgtcatcgaagtcgatcctgtcgtggtactgtaggtcgggtcctgcagttgcgattgacagttatagattgataaagatatgaagaggaagagatgtgataatgaggtgtgaaggggataagtagagtcaagtcgcgaggggaatggaatgtgaatttaaccgggctgatatgatttcagaagtgacggtaatgtaagagttagctgagtgagaactgggggatttggcgtacaagtcatatagaaggtaacatttaggagtgatggtaatggaagggtaggtgaggaaggctgcgtgcttatatatatatcgtattagggagagcgagaagcaaaggcgagtatgtaaaggtgtaatggaagattcctctttttgtacattaagaacgcaaaccaaagcgtttaaatggccatatcatcatttgcttctcacgtgtacaaaatagcataaaagatatctagaaacaaatcacagatcaaaaatccttcaaagcctcctcagtccaatcccacaacctctccgcaggcgtatcatccctcaccgtctcatcaagcttcttatcctccaacttcccaacaggctcataataacccccattccgaatctgcgccttatccacagtagccgcccaagtctgattcaacgcaccctcatgcggcagcacaatcctccaccagcttatcgcataaacaagcaacttctccttaagcccaagaccactaacaagacccgtccccacaataccaggatgcaccgatacagacgtgatagccgggaacctcttcgcgagctcgcgcgcatacaccagattcgccagcttactctgcccataccgccgccacggcccgccgaaccccatatcctgggtcgtcttgagtttttcgaagatgatgccgccgtgcgggtgcatgccccatccctgcgaggtaaggagcacaatgcgtgggtctgcgcaagcctcgaggaggggtaggaactttttgatcagtagtgcgtggccgagatgattggtgccgatttggagctcgtagccatcgactgtttggcccgggggttgtgccatgattcccgcgttgcacattaggatgtctagggtttggtgttggctggtgaaatcctctgcggccgttttgaccgaggccagggaagataggtcacattttatgaatgtgactgcgagcttggggctggtttcgtggatttgtttgatcactttctctgcacttatggcgttgcggccgctgaggtagatgtgtgatgggttgtgcttggcgaggtggattgctgatgctgcacctagcccgccggtccctggggggctgttagttttggacttgtggaaagcagatggaatttggtttatacctcctgtgatgaaaattgacttccccgcgagatcagggatatctttttcgggattatagtcgagaggcatggtcgaggtgtgtagttagggctagatatgttgcgcacaatatcaaggtttgaaagtatgttggattgacttggaatagagaattttagtttgaaataagaagcagattaagattcttgccctgcttttatactgggaggtgcacgatttccgtacccaaagatcaaacatcaactttccggattgggaaatatgcttgaaggctccacatgtggcttgcccagccaatggaaaccaagagtttccgagctcgccaatacaatccgcctatctggcagtcttgatcatgattctttacgttcgctggaacggcttgatattgtaccgaagagcaagtggcgagttttctgaattcccccgagtccgacggtgaagtggcttagacgaatgtcagctatgtagcaatccttgtaatctccgttgcaaactccggttgaaaatcgttgaatgttgaaaatgatgcaatatgttgtaatgcaactatgcaaagataatgatatgcacaaaattataaccctattcccaatctaatatgtacatcgcaaaaacccaaaatcaaaacttatcgacctatcatacgaagctcaatcggtcgcaagatgcaatataccacagcagcaaaggcaaagcctagctcaaatccgacgtcaccaccatatgttgggtcaccagcatgcgcggcgataggacccatccaccacgtttggctcatgcccacaacaacaccggcgacgccaaaggcaaacgcaatggctgcggcgattcccatgggcagcttcttgggatcgtcgtagtcctctgcagaatagccaccgaatccacgtcggaaaacgaagtggtcagcgagtacaatgccggagtaaatggccaaccagtaggcgataagggccatgaagttctcgagaacggtctcgaagtggctgtaaccggggatggcgatggcgagggaagcgcacgaagcgaggaaagtccagatgaatcgcgggacgcgctgcgtagcccggctcaagacctgcaaggtcaagccgaccgagtagatgttggggcagttgttggcgataatggacagggccaggacgacgaggcagaacttgccgaagccgccgagaggttcaagcacggctgcgagcaggccaccgttgactgaggctgcatagccctcggcgtacttgttgtgaactccgtcacccatagccgtcgcggacatgacggcgataccgaggaattgagtgaagagaagggggacgatcagaccaagccaagcagaaaggaagaccaggcgacggctctgggtctttggctggtagacagtgtagtcggcagcgtaactggtccagccagttgcgaagccatagacagtggatccaaaggacaagcaggcacccatttcagaaactccgactcccattgggatgttgacgaaatcgccggagtgggcgaatgtgcccaacacaatgaaaaacacgatgcaggtgggaatccagctccagtactcatacatgtgaacatacttgtacccagcaaaggtgacgaaaagtgtgcagaatgtgatgatgaggataccggcgaatccagggactttactgttcaccgcgttgaggagctgggcaccaacgatggcattggcagcagaccaacccacacaggcgatgatgttaaggacggcaactagacatgaattagcaaaattaacgcacacaagctgatggagagccaacttactgaatttcacaggccaccatccaaaccagaatcgcgagagcaccatctggcgcagtccaaacatgggaccaaagcacgagaagtagcacacggtcatgacaccgaggaggttgaaaaagagacagaccaagatggcatcaacgaagcccaaatcgaatgcagatttaccaagaacgccgatggcgaaggagctgacgaccatgtttgcggccaaccactaggtttggtcagtggaaaaggccttcaggccacggcgatcacgccaggtaattgcaggaacacaccatgctaccaatattaagataggacgtatcagtccgctcatgctccggaactcgctcgacacctcgctgctcgatgttgagcttgccggctaagcgctggatcttggcgtaaagtgaattgccatattcgaagctctcgccgggcacggcgccatcgctggagttgtcgaagagcttgttgctattttgttcggaggcattgttcacctggggcgccttttccaggtcctcatgtgaggggaacattttggaggccatgtttgcaggtcgaatcctcattaacgtaaggcgaagaattggagggagacgagagtatataatcgggagtaatcgaagagctgagtagtctcagcgagacccagggagttcaggatgaagggattgatatcgaatcagtgacacatcctctctttcttttttttgctccaccgaacgggaggcgctgttaatatagtattgtgtcgcgagaattctttgcgcgtccggccccaccacgatctctcgcactgtggcaaggatattcctgtcgcgtgttcctcgaaaagatccataaaactcagagacgggccgaatgacaagcccttgaggccccatcaatggattaggtggaccaatcaggacagccctgccaaccctagcttatcaggacgccgagaattctggccttcgcttccgtctcgggacagttggcgttgtcattggccgacggagttgtgtgaacggtggaagtggagtgtctcgggactcaaccctggagataaggacaacctccgactcccgatacctctgatagtgacattactcttcactccaccttgggccagtgaaccttctctgaccatccttttaccaatcacactggcttgatcttatcattatacaggggccgtctacttggctgaactttgtctacacacaacacccctgattggcagcatgccacgcctctctgcctttcaatcaagcttctgggtccttgccagacgggacacgccgatgtgcgtgaagcttagcaatgcttttttaatcttcacgtggtgattctcattatcattattctgtttatgcgggggaattatccacgttccacgcgaggcgaggacctagcgctattggtaccccggatgttctcgggttggccccagtatatcccaaaagcttatgtttctcagatatgtgttgctttaatcctcctcaatcagaaacgggacggctgcgtatagcctgtggcagtgattctcgaagggtcgagcctgtcggacatgtccgcgcatacccaagcgaagacaatttacatgtttgtcatatatttggcttttggccaacgtatccctaccaaaggctataataagcacggcacacggtggcggagattgccgcgctggacttcattggtgcgatcgcacatgagaactcttgacagatccgatcatgtaaactttgcggacgagatctctcaacagatccgatcgtataaacttgctacgatctatgcttgatttgtctagtgtgctcagcgtgaatcaagaactcttcattggcttagaggctgtcgtgtccaaccagacatcatggtactttggatcaaattgaagagagtgatattgatattcgtcagatgcaatgattactgtttctcctgtctattcaaactcattcagacaagagataaaggagctttccgaaagttggactattgaggcatcggatacctccgttcttccagtatttcctcatctctatgtgagcactgagcagttcagctcaatccacgaatttcgaagctgaacttctccggtcaacattatcttacttcactgctggcgcaatatcgctgtattagcaatttagattagcctttgagcatgaagtcattgaatcctcgctctccttcagccgtactccgtacatcccgtttagtcgatttgaaccatgacaacatcatccttacctatcccgcctgtgtttgattgcaccccttctccccaatagatagtaagttacatcgtgatacacatttaccccttgcacctccagtccagagagcccctcgtcgctgtatatcaccgatgcgagtaatagccgctccttccaagaatgccctccaactagttcctaccctcgacctcgagggaggtggttagctcgaaacttatctctcgcagtcttttgaaacaataaaccaccaagacgaattcttcattacgcctctacatgctcgcctttgcttctcgctctacctaatacgagatgtgtaagcacgaagcctccctcaacgcctacccttacattgccatcacttctaaacattaccttctatatgacttgcatgctaactcccctcgtgctcactcagctcgtcactcctgaaatcatcttatcagcctggttaaatcatattccatcctcctcgcgacttgaccctacttgcctccacaccccattgtcacatctcttcctcttcatttctttaccaatctacaactgtcaaccgcaaccgcttaaaacctgacctaaaataccacgacaggatcgacttcgatgacgacggcgacttcgaacttctatcagacgatatccgtctatcagatagcccggggattaggatagagggcggatggtagggtttgacggaacgagtgcataccgcgctttctgcctgagccagaaacagcaattcgccgaagcaaaaagcaacggaggatgaataagatgatccgctttccctgagagaagaagatctgtatcctctggtactactttgcctggacagccactgtccagattctacctggattactcgaagtcaagaatcggaaatacaatgggcctctctacactggacaaggatatttcgtcattgaaagaacagtcagtcgattcacgtcggccaatcctcggtgaatggtccggcaatcccaaaaatctcagtgaagtggaagagcagaacgcagtggcacacggcgacaatatcaacatggcatccaagccattacgtatttgcttcgggaaaacccattcagagctcacaaatgggaagcatcatttgcccatttctacgatattacatacaccgaggctaaagataacgcctctctacacaaaagtccccgccttcgtcgattattcagcctaaatgccagtgttcaatccttacgccgatttgcccaaccttgcatttgaaagagagcaaagtatacctaaggtgtaagcttgttgagcttcatagatagcccaatagaagcctgggctcttgagtgttctcatctgaatttcctttttatggatgtcacagccgcatattcggtcacattgctattgggaaccctagtgcccaaccctggaggaactctgctaacatcgtcgttatatagataccctattttcgcgcttgcagtcgcttgtttgatcacgttgctgtggcgagccctagtatcctttacgaagtggctctaccgatgtcactgtcaccatagctgcccaggttgttgcgtgtcagtcacattggcatgacgaacgctacctagttctagtcttcgccaacataaaaatgttatagtggtcttgccctattcttcccttcttgcagtctcattaaaacaccaaatctaatagccttgaaaggctgatggcctccgactaagtttatgatgttccaaccttggttggcaaacctataagattccaatgtacagtattccaatgtacacaataggcgaaggcggagtatcaactctagggcaagagcgatcaagctcgactagaactttcaggcacgcgtcacttcgacttcgatttgttgatacctctcgggctgttgttttctttttctttcacgtcacatattcacaccctcgcataatcgttatctatctttcctgatcattcacatcctttctttatctcgtctgtgattcgaacagttggatagacgtacaaaagcaatctgaacaaaatgagtcccgtcaaccaagagacaagctctggcactgtgcgtcgtcgtttatactcgctatcatcggtctttcgcccccaggcaaccaagagagctaggtacttacatacaaagaacgaccaaagatgaaagagatagcctgctaaccaagacatcagcatatctgatgcagtgcaggaggagccaacttgcctggaaaagatccactaccctgtgtttgatcccctggatcctcgtcacaacccagagataccgaccgtgctgtgtcattccaatgagcaacaaagttcgtcttcggggtcacgcagtccaatggcatgggtccaatccctctcaaagcgaactcttcatagagctcgatcaggtctattggcattgaaatcagggtttagtcaccatccaagtgaccgtccaagtgaagaagagccccaggagagaagctttgttagccccgttgctctcagacgcgaaattcagcttgaaagacaacgccacgcaatgtcatccggggggtacacttcggatacacaagaggacccgaactttggcgcccagctatctcgcatggaccttccaccgtcttcaccatcatcgaatgatgaaatggagcctcttgtccgcgtccagtctgtttatccgatgcctgcgcccaatcgatacgaatattctagccgccccgtaagtaatgtcagggtaaactcgacttccacactagccaacggccgtgatcttgacttccaatttgctggaaatgaagagttggaggcgaacatgaattttgaggatcactctaatcacacaattccatcgacagaaacgtatttgatacagcagacatggggcgttgcaatctctaccgacgaagggattgaaacgtccaccaaagaactggcagatcctcaatcagttcctggagagcagcaagcaacaaatcttcagcagcaaaatatcggtcatgcaagttcagatacacaaaacagcgatgatcaaccaatttcagttcccatttcgagacagtcttccgccgaagttcggtttgcatttccaggaatctatcatgaggcgctcaatgagtgggcgagacaacatggtagtccaaacctcagtcgacacagtcttgatctcattgaatacagtcccaatcccagtcatcacagttccagccccatccaacacagtctcagcccacacagtctcagcccacatagccccaacctcactcaacacaacctcagactctatgaacaagaagaaatcccgtgcgctcctcaagagccattcgaccgcattgtacttcaggaagatacacacagcggcctgcctccgtatcctggatacgatgaaggtcacatacctttagtattttcgcaaagtccaatcacacattctgaagaaatgcagccattttcctatcccaatcccctcaattgtatccccaacctgaattcggaagaaatatggtcgtctacctccgaaagagcacccacccagtggtcaagtggagaagattattcaagccgttacacacctgctgataccacatcccgagatatcacatcaacggaaatgacttcaatggaatcaacgacaactgatacatggtctccatggtccccgatggactccaaggtccttttccctagcccagtggaggatggagatgagtatttccttgttgacggcaaaagcagccagtatcccgacggaggcaatgagccagtcaaatccacacagcataccaccagcaactgtgatactactagacctcaaggaccgactgagttgatccccccagggatcatgtccctacgactcatgtccaatggtattaccgatgcagaattggaatttgtggaagaggatacagatgacgagttctatcctggaattgtacagccaagacagttttggtgaaatacctcgtcaatactctaacctgaagggccgcatgtctcttttgaccaaatgtattattacctgaaagatgttttcatcgcagtagttcatcccttcaacatattttctgtagacctattctttgtgctaatattctaagggggttgttaggaactccctagcaagacggtagatacctacaaccaaaggggggtccctggtacaatcccctatataagttataaccaactccagtagtccaagagggacgggaaagagaagtatctcatctatgagtctatcttggtagtcataagtttccactaggttgcaatcaatttgcaaataaggagaaatggaggttatcggtttgtttgcgtggtctcttactgcaagcgcaaagtaaatctgcattcataatcgcatctatacttcatggtatcacatatttgaagctacgtagatcactggataattgatctggctaaaatattcaaaaaatggcatcaccaccagcattcaacgccactcctgatagaatcaacaccataactcaagccatacccaaaccaacctgttcctttctctcctgccacacattcttacccgagcacgagcaaaccatcttatcattatcccacacacctgcactgcgcgcaataacaccaacaagggtattctcatcctcgcgcttgaaaggaccctgcgtccccttggaaaccaccatactccggccaataagctcccagattgccacaggccggtccaagaacacactaccccggcccttattgtcaacatccacggtaccgagaatgccccggcactccttggccggggcgacagtagcatcagcgccaagcattttggtcttcagagactcccagataccacccgtagactcggcaccgcgggagatatctcccgcttctcggatagttgtccagtatttgcccggcgcgaggccgttgattgtcaggtcgatgagggtcatgttcggggagacctggaccatgcgcgcgagtccgcggatgttgttggagacggtcgttgagtgtgtttcgaggatacatacggcggaacctgtttggtaatttgtatcaattgaggttgctcatttatgtcgcatgggatagtaagtagacaccggggattccatactgttggtagtaccgctaccacggaggatggcatcgcggccggtgctctcaatcgcgcttacgatggagctgggaggggcggtgccttcgatgaagactagctggtctttaaggtttgcttcaactttattgattcctgccgcggggtcagtttgcgtgaaggtttagatgctcgcgtgagatgactaccttccaggctatttagagagctggatatagaattcacgcagccttcacatgtcattgggaccgagaaggtcgtctagacataggaaccgcattagtactggctgtttgtgagtcatgtcgctcagacaaggctgacctggaatggttcaatcatggcggggaagagagtatgtgcacaattaaaagcgaaggatctaaagcaagatagagagaaagataatcttccagaagagaaagatcagaaggagactaaatatcagaagaaagatgtgcaatgcgctatacaaactcaaggcggggcgttggatttcaaatcgaaggaactcggcttctgacaaaacgtcattcccgaaccttctcccttcaacattccctcacgcaaaatgtcatcccgatgggcaaatgacgatccagaaacagaagcaattgtcgcagagcaaaaacgcgtcaaggaacaaagaaaacgcgctaaagcagagaaacaacgactagaagaggccaaaaaagctcaagcgcgcgatgccaacgccaatggcgagctaggccccccaacaaagcgacgaagactctccaacgacccagacgctcattcagatgatgccgaattgctgaagatcgagaaggaacagaaaagccagtcgactctactacgctttccggttggagaatgggggccctgcagacatgtggataacttcgaaagactgaaccacattgaggagggctcgtatggatgggtctcacgcgcaagggacatttcgacaggagaaattgtcgcgctgaagaagctcaagctggagaactcgccggacggattcccagtcactgggctccgggaaatccaaacccttctggaggcgcgacatcaaaatgtcgtttacctgcgggaagtagtaatgggcaataaaatggacgagtgagttctccgtggttgacactgtattgtctatatatgctaatcaattggttccgacagtgtattcctagtgatggatttccacgaacacgacctcaaagccttactcgacgagatgcgcgagcccttccttccttcagagatcaaaaccgtcctgctgcaggtgattggaggactcgaattcctacattcacagtggatcatgcaccgcgacctcaagacctccaacctattaatgaacaaccgtggcgagctgaaaatcgccgattttggcatggcccgctacttcggcgatccacctcctaagctgacacagctcgttgtgaccctctggtaccgagcgccggagctgctcctcggcgcggacaaatacggcacggagatcgacatgtggagcattggctgtatcttcggcgagctgctcaccaaagagcctctcttacagggcaagaatgaagtcgaccaggtgtccaagatcttcgccttgaccggaccaccgaactcagaaacatggcctggatttcgtctattgcccaacgccaagtccctgcggttcccctcgacatcggcaccttcttcagccggtaacccgcctctgctgcctcgttcccgattcccctatctgaccaatgcgggtttgagtctcatgtccggattgctggcgctgaatccagcctcccgtcctacggcaaaacagtgcctcgatcacaaatatttcaaggaagatccgcgcccaaaaccgcgagagatgttccctacatttccatccaaggctggtatggagaaacggaggcgtcatcacacgcctgaggcccctaaacgagggcaggaagcacccgagctggactttgcaggtgtctttggaggtgctccgggtggagataccggcgaagtaggggctggatttagtcttcggttgggataattgcttttttcaacatgaaagtaaataataacagattttgtttgattgtatttcaatctatattgtataataaagtctaccttgaagatatcttctggcttagtactgggtgtccctttaatatttaatcaagtagaacctttgccaatatatttgaaaaacatctagcataaaaatgacacagaaatataaaacagtctcagggccaatggctaactatagaaatgtggctatgtataactacggagtaatcaaggaggtaaacgcgcttgatagttcggctccaaagctgatcagctccgagcttctttttttttcctccaacctctcaacgtctggattcatttccttccatacttttatttattgatttatctaatattatttttacgatggcaaccgaacagcccatctcgtttgacgccatcattcaggctggtaattactcccttgccatctgacatctcgcagaatctgacccgtttttgtccacagatcgtcagaagaagaagcaggaggacctcgcaaacaaactcttgggaaagaaccgcagatcaagcgcgccaggctcaggttcgggcgctggcaagaaagtgcagaataaatcacagaatacaaagcctggaagcctagcaagcagggtcggagtaaccaaggtatgaccatggatgcgaccacatttgaagaacactctttgacaatttctcgcattaaaatttagcgctctgcatcagcgaccgtgcaacccaacaagaacaagcctgcgcccaccacgaacaacaatcggacacacggcaaacctggcaagaatgatcgcgtgaatgcggatcaggcccgggcagctttgcaatcccagaacggccaaatgaacacacgatcgggcaacgtcgcgcagaatagccgtccactcggtggcagcaacatgactattaagggtgcttcgggtccgttctttgtcgtcgggaggaactttgcgccggggacaacagcggccgacatccagtctgctcttgagcccataacaggtcccatgctcagctgccagataatagcaagccagccaagtgttactgcggcatttgcatatgcagataagacggccgcagagctagttgtggccaacttccacaaccagagggtaaatgccattcccgtttgatgatatcgcgagatggatgctgacataggctctctaggctgacgggagactgctcacaatgacccttaaatcgacgaagcccgcaacacagcaagaccccttcagtgcgctccgagcgcaagctgaccaggaacgaattcgagcccgtcgtggcccaagccatctgaacgacctcctatccgagaaccggggaaactcgccgactggcctctacagcgatgagatgatggtcgatgcgccggcgcggaatacccagaagaaccagaaccaacggagatggcgtcgttgaaacgcatggctagcgtttttggtaaggagtaaccactgcgcgaagtggtcgtggagatcgtgcttcttgcactctcatgaaatgtatgatatggtcacagcagtttatggacatttttttagcatctggagcagtgtgtttttgcatcagatagcggcgaacaggacaaaatcggacagaatattaatgttttattggctttttttcaacttctaggtcaatccgttcccattttatttattactgtcgctcctcgctacttgtttacacccccgagaggaaagaaaagaagtcaaactaaagaaccaagacaaatctgcaacaatgtcctggaacatcacttgttcagaaactccaaatataagagatatatgtatcccggtcatctcatgcccccaaggggcacaaggactagacgtgactgaagctcaatataaccaaaagaaaagacacaaaacggacagaacaggcaaaaaaaaaaaaggaaaaacacgagtataatcaagtaagacgagaatatatgaccaggaattgatctccagctccctatgtatggtcaaacattccttgaagaatgattgatcaaataggatcagtgcatggcggtattgcgtatgctggattgcaaagtggcacatttgccaatatttcggggaggtcggttcccacgtacatagcttcagagttattaggcacactcaaacaatatagcatatggtgtagccagagaccagatagccgcaaacccgtagaagcattgcggggcccacggcttatacaggctcgaatatcagtccatcgggggaggagtggctgatcattgtggaagatgttgacttgcaataccacattatctaccgggacctcaccagccgctgtacccattcttgttgtaccagtgacaggcagaccggcgccactcagtcgttcaatgtacagtctatcggactggtggatcttcattgctatagcaccagtatcctctataacattgaggtgtacggtatgttgccatgtgtttttttgccatgtgttaggatttcggatcgatacgataaactgtttgatgttaacatagattctgaaatctcacttgggaggtcatacctcatgcatggcgtaccctctctggagcgggggcatgtagaagaacagatacatcggttctggtttgtagtcgtccatctataggtcaagttagtactgtatgcagaaggatatttctatatcctcatgttgggccgacttgatataacaagagatctacgtatgcatgaggaataggactcagagccgttatgtattcgaactcactccttctacccaaatacccgctgggccaagctgcctactaagagcgtaaaactcttccatttccatcttcttgggaccgccaaccatttttccgtgtgcccagtaagtgaccttctctttatcccagacaaggtgcccggaccggtaggcagccatgatggctatcacgttgggggtatttccattgtcatttcccaaatagttctaaggccattctgaccccttctgtaacctgcgaccgactaggctattgtatagggggttgtaaattggcaataattggtggaggtcggcggggtggtcatttcttggcacttatatatcatatcgccagtggaatccagaaggttggagtcttgagtcacttatttttttatcgtatatatatggagagctgtacatacaaagaacatttttctggtaaaaatcttgacctctaattacttcattcttgaggtccagcattgcggcggagagagtcgacccctgtaccgcgtagtctgttcgaggtaggattgatgcctggaatcgcctaatatctttcgcgatggtatcgacggagtgaacttgccttccgtctgtcattatttattgttatggccccactagccgacgcatttggtggtcttctagcttctggtattctgaagctagatagtgttggctctctctcgagctggcgaatgatcttcgcgattgaaggcattattactatctgcattggtattcttttatagagatatgatcagctccgagcctaggggtcttagctgggaagtcgttcaacgccttgattgtctgaagaaggtcaaaacaagctttgatgagttgccactctcccagcggagggttcgcaactgatcttcagctatttctgcttacactgccgcagaaagcaccaggcaatcccaccacttgttggcctaaatcgagtttgaaatgagaagtagatggagaaagctacagcgaccaagaagtatgagtattcaagagctataccgtcgtcacacacttgctacagcaagcggaccttaacccttataagtatttctatccttaggggaataaccggcataccaatataccgtgttgacccacattgctaggcgaaccagttagccagataaaccaagctgattttccaggcaatcaatctggagataacttactcatggcgtaaatagcaaatgcttctgcgtccttgtgcccttgtgtattgccgtttttgtcaaggccgtctgtccccttggcgattcgactcatacacgcaaggttcagcgaattctgggctgggctagtgcatttcacgtcaactggtatcatgtcagatatatctcaaggagagggagactcgaagagaaggaatgagaaggctcactcagcgtcttgcttcctccaccgacgaacgcctccgcgtgcgtcgactcgtggatcacggttgacacgaggaagtcggacagccactttataccccggccctcctttccaatgaagtcaggctgagccagcagtttctctatggcactcttctggttcgtagttgggctcgagccgatttcaacatgcaggtcgcggtagtgcagaccgctccctatccggctagtttcgacctcagtccatttgtcgaacttcaacgaacagaagaccatggtctcctgaactagaccataaatcgctccgtacacatacgccttgattcccggaagcgcgggcacggggccgaagcgtgtctgatcggccccgtcctgtagtgcacagatagcttggtatggcacccagatgccttctttattcggtgtacctttcgtttgaaagatccaatagacgtatgtcccaccttttgcgagagaggctatatatttgaggcataattagcaagggttgaaggtgcgggtttttacctcaccctcggatcgatggacgggtagatggatggcccttacggtttgtcttcccggtagctgatcaacatgtcagcagttaggatcggggatccagaaatccagggagggatcatcaccttcagtgtatgtcaaacccgcgctgtctctctcggagtacacatcggcgtcattgcagtagatattgatatacgggaatccaccccgaatccaacggacgggccgacctgcaaggtaatttgcgtattgcgattgtattgttctggccatgtctctcgttcccttgagcttttctaggccgttcttgtttcgaggatcgtcagggccaaagtagtgctttgtgataaacatgacgtaggaagcgaacgcattgtgttcgtcaaaagtacgctgcgctctagtcgccttgctagccttgaggtttccggagccgtcctcgttgtagaggctgatggctagctctagatgggctaccatgttggatatctgccgctatgtatcagcatcatagcagtagggccaggatttgggtaacacttacgatagcgctagcatcttggatcgcctgggcgagggttcctgagaagtcggaattgctgcaaccgaagaaaacttcccgcttctcgatagacctactggataatagggttgcggatgtttcattaaaggagacttccttctccagagccagtgctgccagtgcggcagaaaatataccagcccataaagcaagccacccagagagggagatgagattcatgccgacgatgatttacttcgtagtggcttccagagagccttaggtgatgcaacactcgtacggcacatgcaaggtacctttagaactttctaaggacaagttgaacgggtccccgctgaattaacagaatgaaaataggcagatacttacctccaacgaagaaataattttcaggagtgcgggaaaactattcgaatatttcaacattacgatatctaacctcggcctcatgatgtctctgcgtggtagcattctccttcacgcgcgacctgaactgcgcaccaggtagaacaaaaaacaaacatttgttcggccttgcagcgtgggaggctagctgggaggccgagcttgatgcaacaccaactataactagtatagatctactgaaatgagagcagtcaggcgtccagtgatgcaatctacgtaagactactattatgcaaaggagggggtcgttacattccgacggagcggtgatatttgagattatgttgtacgcgaattatgcttatcctttctagttctagtgaaagagagaacaattttccattcaagagtgtctgtatagggaaatcgatcatcagagctgacctctcagatgatcgacatctatgctccaaatttaaggctcgcagtcttatccaaagagcgtatgtcagcactaatgcagtagcattgtagggtgtcatgggcgcctgttcagctgcaggggtcaagggcagagcggtcctgatatcacacggagccgacaaacaaatgcttgtttatcgagcttcgctacatagacatgtcgatgctcccttcgtttttcccccacccttctcctccaacgcatggcaactgccttccagttgcactgtttcccctgtcctatctttttgtcttgaaaatccaagatgccgtggacgattctttggacggcggtagcaccggtcctctgtgtattactatcactcggcacaccggcctcggctttgagtacccactctgaacgcctagctgcagctctgaatgccccgggtgcgttccagtcgcagctcaaaccatgtccagcgccgtgtgctagccacgagccccagcactggactgtctatgcttcctttgaccggctctccttctgccatgagccaattcttttcgatatcgccattcacactcctgtgaatgacttttctaagacgctaaagtttcgcgcctgcaccacaggtgatggctgggatgagtccaggaatgccggtacaattagtggaacggtctatgcgggcccctccgttcgggagtccaaggtgacgctacaggttgcacaacagaaatctgcaggagcagctgaaggcaccagtgaggatgtaatcaccgtgctcacgcaggttcaggcatacctccacgcagggatggactgcaccaagaatattatgctgggttactacaagggggtggttgtcggcgtgtatgccggccaggcattgggtaaagctacagcttcatctgtgatgggccaggtcctctccaagttcaagggagcggctcccgcgaccacgcttacacagctctgcggtgatcagcgtgacgcagaccatgtctttggtattgccacttcaaccgtagcggacctttctgctgtgcaggccgcactggtatcatggagtcaagggaaatgtgagagcggactcggcgacgcgacctcactcccgaatgtcagtatctgggaggtaccgcaacatccagtcggaaggaacaataccacaacttcagatcctaccggtcaggaacttgatgcgcccctcctcgctcgcacagccaaatactgcaaaaaaaggacggttgtctcgggtgacatctgccagtctctagccaaggcgtgcggtatcaccctcgaccagttctacaagtacaactccaaggaaatgtgttcgaacctgaagattggctcgagtgtctgctgcaccgacgggttcctgaagccacagccttacgataacggcacctgctatacatacacgacacagaccggtgatacatgctacgatatcggccttgcctggagtctgacggccaaagaccttgggaaatttaacgatggcaccacatggggctggaacggctgcgacaacctgggtcacagtcagaacatatgtctcagctcgggacaccccccgatcccggccgttctgcccaacgctatctgtgggccgcaagtgcccggcacgatcttggacagccctttcaccaacgcctcggaatttgccttgctgaacccgtgcccactgaactcgtgctgcaacatctggggccagtgcgggattgactcaagcttttgcaccctgtccaccggccccacgcggaatccgggcacatcgaagccgggaatatacggctgcatctcgaactgtggtaccggcattgttaataatcatgacggtccttcgggtggctaccagcgcgtgggctactatgaggcgttcaactgggaccgtaaatgtctgcacatgcgtgcacagtggtccaacacacttgactacacccacatgcactgggcgtttggttctattggtgaggacctgtctgtatacgttaatgactcgcacagccagtggtccggctttatggatctgaaagacgtaaagaagatagtttcctttgggggatggggtttctcgacggatgtgtcaacctacgacatccttcgcaaagccatggcccctgacaatcgccacaagttcatctccaacctcgttgcctttgccaatagaacgggtatagacggaatcgacattgactgggagtatcctggggtattgataaccttttattttgccctttcggtggtacgcaagctgctgacagtaggtcttgtctcatctaggcgcctgatatccccggaatcccccctggcctcaatacagatgctcccaactacctagcgacgctcaaggcactacgacaggagctaccagacaaatattccatttccattgccgctccagcttcatactggtatctcaaagcgttccccattagcgatattgcgaaaattgtcgactacattgtttacatggcttacgatctacatggtcccacccccctcccttcccccttcccaataccttagaggtagtctactaacatttgacattgatctccaggccagtgggattatggcaacatgtacacgcagtcaggatgcaaaagtggcaactgtcttcgcagtcatgttaatcagactgaagtgcttctggcacttgctatgagtaagaatctggcccccttgttcatcggcacatgtaattctagttgaagaaagttttactgatgtgcccatcggtcaacagttaccaaagcaggtgtgcattctaacaagataatggtgggtgagtcgagttacggaagatccttcaagatggccaaacagggttgcacaggaccagactgctttttcactggcacaaatgagacctccaatgcgaagccaggtcgatgcaccggtaccgggggctatatctcgaacgcggaaatcaaggagattatttcgcatggcggtgaatcggtcaagacctggtacgacaaggacacggcctctgactacgtagtctatgagagtgagtatcttatttttccgacctctgccatcatccgcactcagcatcattcgtcaaggagaccttatacttatggattgagatacgcagatgatcaatgggtagcttacatgagttataacaccaagcaggcgcgaagggacacatggaagaaacttaatttcctggggacgattgactgggcggttgatctccaagacttcaatgtggctgacaccgtcggtcctacgggagactacaacaagtcgtcgtgcatcaatgtcttcgacaacatgatctggaactgggtcaacccggtcattgatgcccccgtcgggtgcacaaatcttatccaagcgtccccattggcgacaacggtgacccgcacggcatacaccacgatcacgctggtgtccgggggcaccgtcagcactaccattgtgtctactgccttcctcgtttctgaggtcgattaccagccgtttacgatcgcctcctcggatacggagaatgggaccatcatcacatacaatcccatcccgcgtgtgacgccgagccccatggggattcaggtgccgaaagggtgggcgatcacttcgcccgacggcgaggtggatggtccgtccaccaccacagacttggttggtcttcccaccaccaccaccaccaccaccaccaccgatgcaggagggttcatagtctacattacatggcagcccacggtaagctacagcctgccatcattcgtcacacccaaaatccctgcacccaccatccctgacgacgacaactctcccacccccatacctgatccaggagtaaccgactgtatcggtgatgcctgcactaaggggcctgattgcaccgacagcgactgtacacgcggtggagactgtaccggccccggctgtacccgcggcggcgactgcaccggtccaaagtgcgtccggggcggagtatgtacaggccacaactgcgaggaagggggtcgctgctcaagcgatcactgcgtctcgggtggtgggtgctcgggtgccaaatgcaacaaggggggcggatgctcaggtgccaaatgcaacaagggtggcggctgtgtgaaaaccttactgaataattgcagcccgggaccctgcgtcggtccgtcttgcattgatatgagctgtccgtggtgcgacaacggtattaccatcacggttcagcctggggggaatcctgcgcctacacccaggcctacctgtctgaacaactgcccgacattaccttcctgcgcgggcggcgccacatcgtgcaacgagccgtgcaacatcaatcgctgccccgcgaacagcatgccgaccggaaaggcctgcacgagcttcaccactgccagtgactgcacggtaattatcagcagcacggcagtccataccaccccgacgaggagcttctcgaccaccacgcgaactcgttgcgagacggtgatcgactgcgacgtgcaagatatgacagtcacaaccaccatcaccaccagcgaggtcccggacgcaattgcctccccaacggggatatacgactacgagaacgactctcactataatcaggctgtgtttgcagccgttgcatccgactacgatgagtgggaaaggaccgcagacaccaccacgaccacgaccacgactacgacaaccagtagcacacctacgactaccacttcaacctcaagtcctaaccctaactacccgaatgagttcatgatattgaagtacgaggttcacacggtatactttgatttgagtgagaagcactcctactcttggtccggtgactactacgcctacaatcaggattcgacaaccgagaacgtatgcaccaactcctaccgtgtaactggccctatcgacgcgggcgctagtgatgattatcctgcatcactgggtacttttgatctccctgcacagtacacgggctgcaagtactccggaagtaccgactctgtagggtcggttacatgcggctcaaaaaccttctcgtgcagcaaattccaagattatgacgggaaaaccgccacgtttgattgcggtaagactacagccgatggtggtagtacatatatataccattactactatgaggcgatccagtgtgtcatcacttactaaatgatccccccggcgttgtgatatcaaagaggataggggaattctacaataaaagaacaattataactatttgcgttattatatgtgtttttcaaggctcaaagcagatcttcctttaacatctccgagtttcagaagacaaagtttgaaattagcttacagtgtcaaaactagagctagaaagggccagcggctatataagcctaaaactcatgcttttccctttgcattttggacgatcagtctgcgctctgaataaagccgcacttcgtacccgcatcttaagagcctcccttcacgtggctttccctcttgctttcttttaaagctcagctacaggcgacgccctagaggatttctatggattacctggatgggacaaaatttcgggcccacttatctcggtgtacaatagataatactaattagctagtttgaggatagatagactcggcctcttgattgaatctgcctatgtatactattgctagtggctacagctagtactgtgcttattgatatagtctttagggcttggatttccgagccataccatcttaggactagcggccgataaccgtccgataaagatatgatcacgtgcagtggagcttccgcggagagattgagagaaacatctcgacttggcgcaaggcaatagaaggagtgtttggcccggtcattttgtttacctgccgcagacagttccattgttgtatatctgatgataagaacaattactgccccccaaacccgagccaagaatgaaccagaccacgaggcgcgtagcgtcgtacgtcctctgtagacctcgcaacccagtacttctgagatgcccagggagatggaactccacatttgaacagagagaatggtccacgccgctggcaaaaacattagccagtgtcatgagggtaaatatgcacttagctttaacctctctgctcttttgctgatcattgacaccgcaaattaggtcacaggtcccgtaccaatcgcggcgttcatgcgtcaggtattgacttccccagatggcggatattatacaactcgaggggagggcggaggtgtcttcggcaaaaatggtgatttcgtaacgtcgcccgagatctcgcaagtctttggagagttgatcggtatatggactatcgcggagtggatggcgcaggggcggacaaagagtggtgttcagctgatggaggttggtccaggaaaaggaactttgatggatgatatgctacgggtgggtagttgcacttatacctgtcttccttttataagaaagagctcattggactgaccacgatttctataaccaacagactttccgaaacttcaagagcttttcttcgagtgttgaagctatttaccttgtggaagctagtggaactctccgagaagtgcagaagcggttgctgtgcggcgagaaggctgtgatggaggagacagatatcggccatcggagtgtgtgcaagtacttcgatgtacccatcgtctgggtggaggatattcgtcttctaccgcatggtgagtgatgctttcaatccggttttacccttttgtctgatgctgaccaatgacatcggcgacacagaggaaggcaagacacccttcatcttcgcacatgaattcttcgacgcgcttccaattcacgcattcgaatctgttccaccatcaccagagaaccagattgccaacgagccaaggaagatcatgactcccactggcccagtagaactacataatccgcccaaacacgcaaacaccccgcaatggcgtgagctaatggtgacattaaatccaaaagccgtggaagagaacataaaaggagagcccgagtttcaattaaccaaagccaaagcttccacgccgtcatcgctagtgatcccggagatctcccagcgttaccgagcactcaagtcgcagccaggcgcgaccatcgagatcagccccgagagccgaatctatgctgcagactttgcgcgccggatcggtggtgactctgcttctgcgcttgctgctaaaaagacctctccctctagcccaccgccgtcatctcagaaaaagactccatctggcgcagccctgatcatggactacgggacattgtcaaccattcccatcaactcgctgcgcggaatcaaaagccacaagaaggtgccaccactctcggaaccggggcgtgtggatgtcagcgcggatgtggatttcacttcgctggctgaagcggccatcgaaggcagcgacggcgtcgaggttcacggtcctgttgaacagggtgatttcctcgcagccatgggtattgaggagcgcatgcagcagttgctccgtaaggtgcaagatgaagaacacaaaaagacactagagaccgcctggaagcgattggttgagaagagcggcggatcaatgggacagatctataaggtcatggccattatacctgaaaatggagggcagagacggcctgttggttttggaggcggcattcagatgtaaccggcaagtataatagacccaaagccatctcatgtacaataatcacatctttcatcaaatagaatcacatggactcgccgaacatacagaaacaatcaaacagagctcgtcggccccaatatcccagaataataaaaaaactaaaatgtaaccatcaatgcatctaagtggtatctctcatatcaagttcgttaagtctcatgaaaaaagcagatgcataaagcggccgtaaccccaccatcccaaaagggccaattcagtattcctcccagatatccgcagcataagccgcagtcagcttagtatcattgccatacttctgctgccattccacaaacccaccctcgagcacaaatacttgctgcttctggctctcttccgcaccaaacatgctctcgcgctctcgcagatagcgaagggcagcagaggggccacgctgctggctgagtgcacagtggaatacaaccatttccttgtctttgagagtgcggataagctctggcatgcgcacgtccagtgttaagctcgggacccaagttgatgagtggatatggccaccaacgtggtctgttccaactgtcaactgatagtctttgatttgactgtatggcaaaaaaatggttatttacctgagtctcggacgtcgacaatcgccaggctgcttggttcgccagttgagagcagtgtcgctagaacatcgcggcccatgcgggggagagttgcgattgagatggatgacattttttttgtcgaactctgtgaactgtatatataaagagagctattcgaagtgaaacgagggggatatggtaattttacaagattcccaagattgcaggtgtgatatttacgatctcgagaaaaatgactctaaagcacacgacacgtgacctataatttcctttccaatcgggagacaatgattttccgtcacgggaacttcgagcacctccgaccctgcgcgtctacctcgattaatctctccttcccaagcccaggagacagttcaatccacccccatagacctgctgccctgacacgagcgagtccaaccaaaatggacttccgcctcctagcccgcagcctccgcgccaggccaacaccatggctccaacagcagacccagcttcaccgcgtcgcctccctcgcgaacggagtgcgctacaattcctccgcctcatcaccaaccccacccttcaaacccacatctcccaccgaccagccaagcacggcccccgaggcggcgaagcaagcccaaaagccgacctccgagccaagcacagccgcccccagggccgcacagccagcccgcaaaccggtctccgacttcgacgacatcctcagcagactcgacctcagtaagccccgagaagcaagcagcgcccagcgtcggatcttctcagactcgctttccagggctgtcggcgaaggcgcacagagcagctaccgggcgcgctcgagagtgcctctcccttcacgcaaggtcgagctgaagctcgggccgacgcttggtcgacagattcaggttgagccggagcgtggtactgatctcggtgctgcgctgcgcaggcttcaggctactatctcgcagaatagcgttcggcatgatgctcacgaacagaagttccatgtgagaaagggtatggtgcgcaagcagaagaagatgttgcggtggaagaagctgttcaagttttcgttccagggcactgtgaagaagattcagcgtatgcaggcacagggttggtagttttatgctactccttttgctttgggcttttgtgctgcggcttgtctactcggcttgtatgtatatactgagaaggctggtgtgggtgatggactgagtgggcagagtggccttggcctgaaaattggtgttttcttttgttacttgtacaactattatctaggtacttgatttttctgttgaatttggctcttgcattagatatggaatgaatgcatcggatttgtttgactcgattacttgggtatagcatcattatatgtaaagcaccggctttttgctagtggtcaattctgcctctcaagttaggtacactgtacatgtcgtaagcgctacactatatgtacctagttcctcccagttctcaatattaatccctctttccagttggcaagacatatccacttccaagcccgttcccattgccattgccaatagtagggccggagtaaccaccatagccattgttcttccccccattgccaaaggtaacaccaggactcttcgctccacggacgggggtcgcacccaaaagcccatctccatgccaagcggatcgcccacgccaacgcccaccattgcgctcccagaaaagcgcaactaaagcgccaacagaggccgccataacaaagaacaccagcttggaaaagaaagacccagagctcttcccagacccagtcgccaaagccagccacgattccaaagcaggccgcaccggccacccaatactggcaccgccctccaaccatgcaacgtggaaagagaaggtaagcggctccccacgcacaaccttagtgccatgcccagcagtccacggctcgcgtgccgcctgagcaagggcaacaggctcctcgtcctcgtcgagcttggcattcttgccggtgttgtcgaactcgggagtcgagtatgcaacaccgccaaccacgaagccaggctgcagagactgaccaccgcgagttttggtgttttgttctgcagccgcgtccgaggccatgttgtgcattacgacgttcatatccgtccagatgtgcaaatggctcagttggagtgtgccctgcagcgcgattgtgagaggcgtgaagggtggcccgttgtcggctagtgcggagagggtgtctgcttcgcctgacttctggtccgagtctttgtccgcgtgctctgcgctggtggatggtgtcagcggcgctgttggcacgcggcagctcattggtacatccgaatggacgtagaactcgaggaggtggtacatctcatcggagagggagtcgatggtgcatgttattgtttcagatatgccgtagtggagagagagagggcgggcggtttcgttgcaggtcacgaaggggacgtattggagtttgccgagattgtcagtgacctggatgttttcgtagttgctattagctttgtgtttcctggtagtctgcgctattgtcttcgtgtcaggagacggtaggcagactggtggcgcttacatgttctccttccctgcaggtgtagaacgagcaatggttagccgtactctacagcttgattgaagagtggtctcacatggttcgattcagacatgacactgggatatcctctctcaatttgtatccgtcgctgttgtcattggtgctccccgcaagtgcgttggttggccacaatgcgcctgtcaaagacagcagcgctactgctgcggaagacgggctcaattgacgtaaaagagacattgttgcttttttctccaatgatttaaggagaaaaaccgccccgcgtcggcaagtttcagtgttcgaggattgcgcaggagtgaaggacggaggtgtacccgcgttgcggagttgcggacaacaaagcgggtttccctacgatttccccttgctgctacttccaaccacctccctacttctaattctttcatatctaacaccgaacgtgtttcgcattccattcgaaagcttacttggtaacggaatttttgggaatcattcatttcttttcaaaggaaaaatatgtggaaaatcgttgctcgtcaaaactacacatcccacagtgcttcatgaaagactaaaacactctaagacagcttggccttctgcttgaaagcaagcaacagaccactggtggagctgtcgtggtcagcaccctcgcccttggtctcgagctccctctggatgttcttcgcaagggccttgcccaactcgacaccccactggtcgaacgagttgatgttccaaatggcaccctcggtgaaggtgacgtgctcgtagtaagtgatcagagcacccagggtagagggagtaatcttctgagccaaaatagaggtggtgggacggttacccaggaaagtcttgtgagcaacaagctcctcggcagtgccctcggccttgacctgagcaggggtctttccaaccatcagagcctcggattgagcgaggaagttagcagccagcatacgctggtgcttgccaccctcgacggggttgtgcgactcagccgccatcaagaaatcggccgggatgagcttggtgccttggtgcagaagctggaagaagctgtgctgcgcgttggtggcaggctcaccgaacaagataggtccagtggtatacttgacgtattcaccggtgcgagtgatggcctttccgttgctctccatggacagctgctgcaggtaggcggggaagcggtgcaggtactggtcgaagggagcgaccaggtgggtttgagcaccgaagaagtcgctgtaccaaacgctcagcagaccaccgagaacgggaatgttcttctcgagcggtgtttcccggaagtgcttgtccatggcctgggcaccagccaggaactggtggaagttgtcgtaaccgatgtacagagcgacagacaagccaatggcactccatacggagtaacgtccgcccacccacgactcgaatccgaacatgttcttggcatcaatgccaaacttggtgacctcgggctcgttggtcgacagagccacgaagtgcttagcaatgtgtgaatcatccttggcagactcgaggaaccaagccttggcagtgttggaattggtaatggtctctgcggtagtgaaggtcttggaggcaatcaggaaaagggtggtctccgggtcagagtgcttgagcgcttcagcgatgtgtgtgccgtcgatgttggagacgaagtggagcttaatgtcggggtggccgtaaggcttgagagcctcggtgaccattacagggccgctaggtgcagatgtcagctacaattcctgcttaaccaaggacgagaaagcttacagatcggaaccaccgataccaatgttgacgatggtgttgatcctcttgccggtgtaacccttccactcgccgctgcggacctgctcggagaactccttcatgtgctccagcacggagttgacctcctcgacgacgctctttccgtcgacctgcatgggctcattggcaacattgcgcagagcagcgtggtagacagcacggtcctcggtgaagttgatgtgatcaccacggaacatggcatcacggagctcctcgacattggcctccttagcgagttggaccagaagagaaacagtctcctgggtaaggaagttcttggagaaatcgaagaggatctctgtgttgtctacggtgttggtgaacttatggctgaagttctggaaacgctttgggtccttctggaactgatccttaagaactaggttacgtcccaaggtggtgtggtgctcctggagctccttccaggcgggaaggtcgctggtctgcgaaaagccgggcatgatgacgatgaggggttctatagacaagagggtcagtgcggggcaagtgaaatatgaaggtaatgtccaagtatgtcaggtttatgatatagaatgaaacttataaacatacattgaaagtagagtggatgatagagaggaatgaagaaaccaaggaaaggcaggaaaactaatggcgtcagtcgcatccggcgcgttggggtccgagggggtcgtggggcaacatcatcattaccgcattcggctgttatttcacttgttttctttattaaagaggttttggttgtttgacttgtttttatctagtttgctgctggaattattcttcttagtactgctattatccttctcattggagcctttcacctaaaacctctccttttgttctccgcaggtactgaaaatgtatacggagtacccggtataccaattcggacacctgtaatttcgtactccataggctattgcttttactcttctgggaccaattcgattccagcgcgtttaattgtatagccgggcattggaaattgaacggctatagcttttttgtagctaaaacagtcctattctcaaggaaactaatgtgttactcttgataagatgatactagttactactgcaagtctactccgtatactccgtatgcattgcaatataccttccaaccctccaagggccggatgcatgggaatttccaatgctctctgtattgttttgagggctaatagaacctgttcatagaggatatgcaaaaagtactcctacaagacataacatgaatagattcgctggacggctaaacatggaacgtgcacgggccaatagaaaattcaccgcccatgtcaccgcccgagcttttttgttggcagctgatagttatcggtttgaattgcgccttgatcaacctcactttcttacaggtgatacgactggcttgcatcatgtacaatccttaccaaggtgagtgctatcttctctttgaccttgataaaggtcttgatgcttcggaaaacctaaaactaactcttacctagctccgggtctttatggacgcgcgcctgactacggtgcctatggtgcgcctccgggcatgggtgagttcactcctttcgcgcattaatgttattaacaatatatactgaccagtctcagcccctcctccaggaatggctgctccaggcactgctgcccccctcggcatgcagcaagcaaatatccagcctggtcgtccaggaagcttcccgcccaacttccaaccgcctatgaatatgccaaacatcaatttctctgcgccggtgattcgcttgggtacttcgggcccgaacaagcctgcagctcaggagaatggtcgcgaacggggacccgatgctcctgggcgccgcggtggtctggggtcgatgggaatggatacccagcgccatcatggtcgcgagaccatgatgcagctccagccacctacacgcgacgaggtcgtgcgcaccatttttatcggtgggattacagagggcgcaggcggtgatgatggcattgagcgcattctacgatctactggtatcttgcgtcgctggattcgcgcgacagatgctgatgacaaaccttgccggtttggctttgccgagtatgatgacccggagagtcttgagattgcggttgaaaccctgaaggacgtggaagtcccggtcaagatacaggtacccctcgccgaaggcgatgaggaacaaaaagtcgaaaagagcaagcttctagtgcgttaaaattccctccctatccgcaaatctgacttctaacttgtctactaggtcgtcgtcgacgaaggtaccctcacctacctagagcaattcgagtctagccgagccgaacaagaccccgaggaacgccaggcacgtttcaccgctgcgcgcaacaatctgaacaaagtcttgacaagcctcttccatcccacagccccgctgacaaaggaggagatatcggcccttgatcgggaaggcgacacggaaatgaaggacgccgagcctgcaaaggatggggaagtggtcactattcccatcaccattgaagatgagctggccgatatccccccagaaatgcgcgccaatgtggccaaggagatttcggctttccgtgaacgaagcacccgccgcgacatcgagcgtatgaaacgcgaggaagagatcgagtcaatggagcgtgcacgcaactctggctctcggatcaatcgacttgtttcgcccccggcatccgctcctagtggccctgctgccggtatcaacggtattcccttgggcccacgggatcgcaatgtgatgaacgcaccttctggtccgagggcattcggtgtgcagattcctaaggattatcagaagggagttgcttttgtcaatgccgatgccctcaacggtgacgacaactcggatgctagcgacgaggaaattgaacgccgccgacaggatcggctcaaggctgaacaagagaaggaattctcagacctggagcgccgctggcttggccgtgaacgcagccgaaccgcagccctggagcgagagaagaagcgtgaggatgaggaagacggaaagttgcaagctgcgcacgatgagatggaagcacgacttaacgcctggaacgatgatgtcgaggacacccggaaggcagtcgattactacgcagatcgcggtacctggctccggacccgtgcagccttccgttctcgtgaggcccatgttgacgatgccgatcgcgccgctgaggatcgcgaacgtgtgcaatccgccaagcagcaggagcaggctcgcggcatggccgacgacttcctcgctcgccaggccaaggagctcgagacacgtccccaggaggcaccgcgcgaaccccagcgcttcaagctctctcttggagctgccgcgcagaaggcccaggccgcaaccagccggcgcgcagtggccgatgtggaaggtctgctggaggacgaggaagagcctgagacaacaacccgtcggccactcattccgatcaaattcgactcggcggccgaagctgcaggtctcactgacgaagaacgtgctcaggcggcccgtcaactcgcagcagagattccggctgagaaggaaggcctgtggaactgggcaatcaagtgggaatttgtggacgatgctatcatcaccgaccaactcaagcctttcgttgagaagaagatcgtcgaatatcttggtgtacaggagcaaatgcttgtagatgtggtggaggaacatgtgcggaagcatggatcgccccaggagttggtggagcagctggcagaagtgagtatttaccccttggtcttcttcttgacacaatttactgacctcaatcccctatctataggcattggacgaagaggctgaagtcctcgttcgcaagctttggcgcatgatcattttctgttccgagagcgagaaacgaggcctgtccttgtaggttgcacatgaacgacaggtgtgcctgatgtttccgggcttcactgagatacgaaatacaacatgtacacaaaggaatagctagtggttgcatgtacaatgccaaattttttgaaatctcatactctgggggttttcaacaggatctggtctagtctgcaggtaaacaagctcccacgtagcttggggtaagtcacggagcagctccgagtatatatctgggctctgattggtggaatgacatattttcccggcatttacaattttccaccaataagatcgggtctgctgcaaatgactagggaggagagaggggtgcgggataaactggagatggcgcgggggaagattgttgctgtatatacggagtaggatctcgatgggcttttgtaatctcttctcggtgatattcttcgtctcttactcttccttgtgcatctttgagctgccaaaaaagggtagaaccgactttcgattctataccccggatatatacaccccgcatttcaggattaaccactgtgtttctctagcaccgacctgcgccagcaatatttcaagccattgacagaagtaaagcctatttctatcaccacaagtaatagccatccacaatggttaaaatcactggcttcaccacacgggacgtgaggttcccggtacgtcaatcttgcagttccatatacccaatgcactcaatactgacaagcccaccatagacctcgcttgataagaccgggtcagatgcgatgaacgcagcaggcgactactcttccgcctactgcatcatcaccacagactcagaacactccggacatggcatggtacgtcacaccatatcaccaactcacagcaatccaattaacccaacacctgcagaccttcacaatcggccgcggtaacgaaattgtctgcgcagcaatctccctgctcgccccaatggtcgttggcaaagatctagacgagttgaccacagactggggcaagacctggcggtacctcgtctccgacagccagctgcgctggatcggccccgaaaagggcgtgattcacctcgctctcggcgctgttgtcaatgcactctgggatctgtgggccaagaccctcggtaagcccgtttggcgtattgttgcggacatgacgcctgaggagttcgtgcgttgcattgatttccgctatatcactgatgccatcacacccgaagaggctatcagtctgctcaaggaggttgagtcggggaagcaggagcgtatcaaggaggcagaggctagccaggctgtccctgcttacactaccagtgccgggtggttgggatacagcaaggataagctgaaggtgttgttggatcagagtgttgagcagggatacaagcatttcaagcttaaggttggggccgatttggaagatgacaagacccgcttgcgtattgcacgggaagctattgggtatgataagggtaatattttgatggttgatgccaaccaggtacgctatcactaccgattccgtttcactttcgagtcagactgacactgggcacatgaataggtctggtccgtccccgaagcaatcacctggatgcaagagcttgcagagttcaagccctggttcatagaagagcccacctcccccgatgacattctcggccacgctgccatccgcaaggctctggccaacaccccctacggccccgtaggcgtcgccacaggcgagatgtgccagaaccgcgtgatcttcaagcagctgctgcaagccaatgccttgactgtcctgcagcccgacgcctgccgtgtcggtggtgtgaacgaggtcctggctattctcctgctggcacgcaagttcggcgtgcctatcgtgccgcactcgggtggtgtcggtctgccggagtacacacagcacctgagcacgatcgactatgttgtcgttaccgggaagaagagcgttctcgagtatgtggatcacctccatgagcacttcgtccacccatctagcgttaaggatggttactatgccaccccgttggagcctgggtacagtgtggagatgaaggctgaaagtatggatgcgtttgagtaccctggtcaggaagggaagagttggtggagatccgaggaggctaagagcattatttatgggcccagggttgtatagatttggtaatggcgagtgctgttgctctagacgatcatgtgtttatgtatatcatgttaatagctttcaaaaataggtttcaatatagtacatactcactcggttcagattggctgtggatatatatagagggctgtctccctagacatgttctcaggcgagacttgaagatagagcttgcgcaacttggtcaacagatgtggatccccaggatcaattcgactttttaagtaaatttgggatgactagcgcattgaagttagaatcccatgaaactatgatacatttattttacaggtcatcataagtgcctggatgaacggccagtggctcggttttagaaaatataagggaagcgccaagaacaaaagtccagaggctgtggatgttcaaatgctcatcggagtgaaggcgtagaacctatgtagtgcgggggtgagggtataatgagaagttagcatcatcgccagatcagcgccactgaataccgaaaagtttcaaggcgccagccacattaggcttctctgaggcttgctcgaggattatgcgagaatgccctttcacatccaacgcgagaagctggtactcaaatttgctcttatccaaaggtttcatcatgtgtacgatgaccacgccggagttgagaggaccctcgacctggaaatcacggttagtacactcatctgagattgaccggaaagggtatcatacatggaaatgcatgcgaaggtgctcacgacccaatcgatccttttcagctgatgatctagtcaattgtcagcatctcggctctctcgcattatgtacaaaccctagaacctacgcgagaggcttgttccgtgcccaccggctcgtggtctcctcgccatatgccttgatctctcttcggtcaccgagcaattttatacactcggggtcatctttaatgcgcgctaccgctgtttcaaattgcgccgtcttgctgtttggcgacaaaacctcgagatagaaaagtgtgaagactccgccctaaccagatcatagagtcagcaactattcgccaaagcctcgtgaatgaatgtagttcataccgtcagtactgctccagccaacacgataacgaagttgaaggattgctgtgttgcccgcgcaaccttctctcctcgactcaaatcgccccactgaactctcccatcgtcggacaagattgtaatgctttttttccttgaagaagtagtttgaggcccgctacctatgttgctctgcgtggcgtagagccgggcgatctgtgtctgtatgcggggagagggccggaggagaagatatgccggcgatagtccgggaagagtgcgcagctgaagagaattcattgtgaaggtcaaaaccgagcgtcctggaacaagttggagtatctgagtcgaataccggactcgaccgtcttccaaccccgaaaggttccaggttgctatcgatcttcataatcggcagcacgtgcttacaatacggtattacaatacgtcctatggcaatgaagttcccagccaaatgtgaggcgttgtatcgcgattacaccaggcacagggtcgacagagtccacgttcgccgttcccgacggacgctttgctctttgccttacctgctcacattctcgcccaaaccccctttttcttttctctttgactttcccattgatctcccctcggtacaatcatgagtgccacaaaggcgcagtctcaaaaaatctttgagaaggccaagttgaagcccgcgaacaaggtgcgcatacccccaccccgtactgtatgattgtggcactcgattctgatgtttttgcttttcaggtatgcttcgactgcggctctaagaacccgacatggtcttcggttccattcggtatctacttgtgtcttgattgttcggctcaccaccgtaatctcggtgtgcacatctcctttgtccgatcaacaaacctcgaccgtacgtactgccgcacaatttctacacatgccaagtattccggtggctcaacgctgacatttctatagagtggcaatgggagcaactacgggtgatgaaggtcggtggaaacgaatctgcgaccaagtatttccaatcacacgggggttccgctgcgctggcgagcaaggacaccaaggtcaaatacacgtgcaatgcggctgtcaagtataaggaggaactcaaaaggcgcgctgcgctagatgcgcaacagtcagtggatctacacccggaactggcacgactacgtgctaactagtgttattgctatatttaggtaccccggcgaagtcatcatcacagatctccccgccggcaccccctcagatgactcgaacacccctgctggtgacggcgacgatgatttcttttcctcctgggacaagccctcgatcaagcgtccgagcaaccccccttcgcgcaccagtacgccccccgtcgtcagccggaacggatcccctttcctgaacgctggtgcaaacggaaacggagcccgctcgaaatctcccttgtctgcttcggaggaaaagagcgcttctcccgcgccggctgctatccggcacaccagcgttagtcggaagacctctacagctagctctgcaaagaagagtagtgtcctcggtgccaagaaggcacccaagctcggagctaagaaaattgccgccgcggatattattgatttcgacgaggcagagcgcaaggccaaggaagaggccgagcgtattgaaaagcttggctacgaccccgaggctgagcaggcggaagacgaggccaagaaggctgcaactgctgccgccgctgttccgatcgcctctcctgttccagtcagccctgctggcatgtccaatgaccgaaactccggtgatgtggggcgactaggcatgggtgtgagccgacttggctttggccaagtgtcgaagcccgttgcccccaagaagccaacatttggttctattggccctgctaagcccaatcccgctgatggtaaatttcctttccctcgttgattgtacgtcacatgaaagataagctgacactcgacacagaagcggaactcagccagaccaaaactcgatttggcactcagaagggtatctcgtccgatgaattcttcggacgggagcgattcgaccccgctgcccagtcggaggccaaggaacgtctccgccaattcgatagcgctacatccatttccagcaactcctacttcggccggcccgaggatgaggtcaattcgcttgacgatggctatggtgatatggaggttgctgctaaagacttcatccgccgctttggtatcacggctggagatgatcttgagaacctgtcgcatcttgtgggcgaaggtgcaactaagctacaaggtgagcaagtctctgtttgggcatggacccacgttttgctgactgaatatcgccaggtgctatccgcagctatttgaacaactaggctagctgcccatcaccggatattacgccttttatcactccaagtaccttagcaagcaacattgttccctatccccggttccgtcatcttcctacgcgacgtatattgtgtctcccctgtccatctcgccctttgacaatatttctttacttggaaaaacattgcgatcagcagtcggccaaaaacttgggtttcatatcattctggtttgcgatctggcgattattttgtcttctcccttgctttttcgcattcctacacagcaacatggaatgatcgaagggaccctttattttattttgctcatttcgttgatatggtttaggataaatggtttaggataatcgagaaattcatggtttgatattattgatagacaagaatttttgacaaaaagtcccgcaccgcccataactccatgatgaatgaagataacacagtaagtagtacatcacagtacaagtcacatccaagtgttgaatacaaaaaaggccctatatataaaaaagccgggcaaggctatacagtagcaagtacgacctcaatcaacgcgataaatcgcatcggcaaccttcgccacctgccacatctcatggacatcatgaacacgaacaatgtccgcgccaccagccacgctagcagagacagtagcagcggtaccccaaacgcgctcccgcggcgtcttgaccccagtaagatggccaataaatctcttccgactaggccccatcaaccaagggaagcactcgagccccggcatcgcccgcagcctaggcaggtcccgcaatatctccagatcatgctcctgaatcttcgcaaagccaagacccggatcgaggatgatgcgccagcgccggatccccgcgtcttcggcagccgcaatgcgcgcgcccagctcagcagctacttccgggataacgccggtcgggtactcgtgtagggtcgtcatcgtttgcggcgtaccgcgcatgtgcatcaggatcacggacttaccgatccgcgctactgttggtagcatttctgggtcgaggaggccggctgaaatgtcgttgatgatgtctgcgccggcggcgcaggcggcttctgctacgctggcgcggtaggtgtcgatgctgatggcgatgttggcggcttctggaatggcggttcggatgtgcttgattgctggcactacgcgggcgatctcttcggcggcgccgactggttttgagcctgggcgggtgctctcaccgccgatgtcgattattgttgcgccggaggcgatgaagttgcgtactgtttctgttatgtagtttaggtcggttggggagtgcttgccgccgtcggagaaggagtctggcgttagattgaggattgccatgacgtgggtgctgcgcttgggatccgttgcgcgcaaggatgggaatagtggtgagattggggttgtcgacattggtgttggatctggcggcgagagagccttcagatgggtgctgtatgtttgcgtgtcctttcctggtagtggagggtattcatttgggattaatctaaattcagatggttagttttgcttattgtgtcggtatagcatatataaagccattgggagcgtactggctaagaggtcgcaatacaaagtctcgctcaagcatcagattgtgtgggatgttgagacgctcatgacagacgatctcctcatcatatagtaggatatccagatcaatagagcgtggacctttgtcgatgagcttctttctgcccatcgcaatctcaatagattgaatagtgtccaaaagatccaaaggtgcaagggttgtttccacctgatagaaattaacaatgggctaccagtttggacattactttcgctaacatacctcgcatacaccattgatgaaggtatcttgatcaagcacatacatcggtgcggtttcgaacaatgaacttgtccttttcactttgataccaactcggtccatttcaagacaagcctgctcaatcatttctactcggtctccgacattgcttcctagggcaataaaagcccggtggatgtctggactgggaaacttcaaattcatcctggagtcaactgcttgcgcagtggataaattcctcacaggcggggtcaaatgcaacgacgttattgaacgtcgtgatagaccatttctagtgagaattcccgatgccaattgggctgtatataccgattgagattgagaagttgaccctattgaatattagtgttgcaataaagtagagacatggcaaataaaaaaaatttgcggggacaggcatatttccccattgggacgatacgccgataagcgtgcgaggggcttttaagaagtagctagccacatacccaggctctgcggtgagggttttctgttactataagatgtcgtcagattcgccacagttaattggttatttggggctttaccctgtatgcaacggtctatgaccactcctggccggacctgcagccaatggcgaaagtcttagcgacctcccaatttgccgtgtatgaggaagaagagatgccaatggaggggctctctggattaccctggcattcatgctgatttgaaaaggaacgtagcaatacaaataatgtaggcaagggctttgagtcaattctggtaagtttcacgtggttcgccttcttcttggcgttgacgccgtgacgctttgacgtctggatgccttggtgccttaatacctatacaacatttctgattctccgaagtagatagctagctaggtggctttcgtggcatatataatgcgaattacgctcattcctcaccgtgaacatcacccatgaatatcaattgatcgaaatatctagtttaagtcctgcttgatgatgtccgccgccttctcagcaaccgcatacacagtcgcctggatattacctctcggctccaaggggaaaatactagcatcgacaacgcggatattagccgagccgtacactttcaggtgggaatccacaacaccgccatcttcttgtggcatcatcgcacagctaccgctgacatggaacatagacaagacgagctctgtgcacagctcctttgctttctcaagatccgtcagaggctccggtgtgtggaggcgttcgccacctttcttcagtagcgatgtcattggctccgtctcagcaatcttatccatccacatactatgcctagcatgcaactccagatcaaccgggtgacggagagttccatgatcaatgagaggagcagccttggggtcagaagattggatatggacggaccctcgtgatagagggtagctaagcagagaaacaagagtaataaagaaacccgggtgcccgagaccgaaaagacgtttgggggattctccttcccggggcaaaagctggaatggcgctagaataaattgagcattaggttcgtcgggattctggagtagggtgcgtaatgcttcatattgcttcttgtgtgtccgcgagatgtcgggactgtctatcgaagcttgcagcttctgtagcaattgagtccgctcgtcttcgggggtatctacaagtggcatgaatgcagagaccaggggcaccatgccaaggggtccggagccatccttctgataagcggccatggcagcacccgcaacggcagggtcccgagccatgtcgcctgacggcataccgtctgcgacttcatatccgaacgagacaataccgtggtcttgcatgttctcgccaacaccggggttgttgattattgtcgggatcccgtaggactggaggaggctttcatctccaacaccagatagctcgagaatttgagaggattgggttgttccggcagcaagaatgacttctttcgcgactgacacggtgtacacgtttgagtctttgctaaacaagacaccagtagcaatggcatcaccaccgttgcttcccttctctatgacaatcttttcaacccaggctccagttacaacgcggagattcgaccgagcttgcacctccggccccagatatgcagctgcagaatgacttctggtgtgtgtggcgggatcaatagaaccggggttcacgaagggaccggtaccggcgccattgatcgggtcatcggcctgcgggtacccaagatttttgaaggtgtccatccatgccgcatggtaaggcatgtactgatctccaaatgagacttgaacaggacccgtgctaccttgatcctgctggtcatatttcatccccttgaagaactcacggttgtcatctgatgggggtgctgctgtatgaaacttgcgaatatatggggctaggccatcccatccccagccggggttgcccaatgtttcccaggcattcaacccggaacgagagggatagatgaccattcccatattgattgctgaggagcctcctaaagtgcgacctttgctgcctaagagcttacggccattgagttgttcctatgttacatggataaggctaatggcaaactttatggggattgagtgaataatagtgtacctggggacacgatcgaaaattccaatcaaagtcctcgtcttcaagtgtcgccggccctaagccgggaatgatgattcgagggtcattgagacggtttgttccggcttccaggacgaggacgcggatattgggattttcagtgagtcgattggcgaccacgaggccagcagtacctcctccaataatcacaaagtcataagatgcgttctcaagacctgccgaggactcggtgtcgaaagttgccatggtcagttatgtaatgtaagtgaagcaagatctgaatgagagaaatacatctagaaatgagatgtatttggggattgctcttaggaggggtagacggattggggggctctcaattgagtggcgtccaactgttttaccttcattggaaaaaaatgtatttcgtagtacgtacgtacatgtgacgctgatagctcaggggaagtaatgtgatgtattgtactatggacagcagctggttaaggtagctactacatggtcacgtacgcccacgtaagagcaacagtacaatacaatcaacgaagcccctgaatctcttgtcgaaatgcgccccaagctaacagaatccaaccaatctaatcggagacttatgttgtatcgtagcaacgggatgggccgcgctatgccgaacgggagcagtgcagaccgagctagagctagcctgcatgtgaaacagaggcattgtattgcaattgacgggatatatttgccaagcctcggtaagaagacaacatccctgtcctttcgggatgaaacgtgcggggatgaaaggctaggcctaggtagtgcatattttgctgaattttctccaccggccttgtccaaaatatcaaatctcggattggtatgaatgtgatatttgacacatatgtacggagtgtacctcacccatttcgatgaggtttttcttccccaacttccggccaaggctgggctcgggcgggggccggtgcgggctcgtctccactttcctcccgaacgggattggttccaccgagccgatacgctagccgaaaataggttagcgtgtgtattaggtccgggcataatttacagcgtatcactactaagccacaataaaaacggcctagagagggtcatctgttctattccttgtctgggggtacccagcagccctgtgggttagcgtaggttcgcgtatattgattaggaaagtggatcttgatattaaatatttcttactcctcattttctaaatcttctaaatcgccatgcgacgttgacggtccgagtaacggtatcaaactgaaaaggaaagccacaatgggaaactatggactaaaagcggaggatggcagggaggtcgtgattgtgatgctggtctttggggtgatttccctgagttccacgattcttcggatcgtgtcccggagaatgagaagcatcagcttaggcttggatgattatttcatgattagtgcgacggtacgctcatcaaacagcctttctagcgtggcgtgagactgatgaagcctgcagattttggtaatggcgtgtactgtggttgtaatattgagtatgaaacccgtcggggaatggaacaagagacagcgctaacgggtatctcacgcagtggtgacaaagggaggagttgggctgcatgcaaacatgagagatgtcgcctttccagacatagaattcaatctcaaggtatgtgaatcacaacccttccaaccggtggatgaagctcaccaccgcgcggaaaagatgattatcgtctgccagattctctacgcaattggcctcgcgcttgtcaaaacatcaatgatgattctctatcacaagctctttggcaccaaagccagcatgcggattgccatttatgtcaccggtactatcgtgtgggcgtggggactgagtatcatcctcgaatcctttcttatttgtcaccccgtcgcctttaattggaacccgacgctacctaaaggcggatgtggaaatcgtaatgcagcctttgtggtagccggagtactcaacatggtgaccgatctcatggtcatgttacttccaatcccatatatttggaagctccagctacccgtgggccggaagattggtttatcggtagcattttccataggactgttgtaagtggatccgcgactgtgctctgatcttgattgcacgttcaatggctaaccttttgaaccacagtgtcagcgcaatcagtatggtccgcgttgacagtctcatgcgcatcgatttcaacgatctcacatatacccttcccattccgttaatgtggagtatcatcgaacagcaactcgccctcgtcgcggccaacctgcctcttctccgtagcgtgttctccgccgtgcttcctggtagttggctgggctcatcagctcgcaggactgggacaccatcgggggagcccagtgcgaagaagcgctcggcgcaggaatattctctcacgcgcatggatgctggtactaatcgaagtgaggtcacggcagacagccacaaacatgcgaatcacaattcccagacgaggtggagtgacgatgatgagcaatcggatacagagttggctgcgaatgcgatgccacctgatgggatccagatatggaaggcttttcgagttgactcgaccagagagaatgttatttgatgataatgataccaatgacatgtccctcgccacgataaacacagtctaatcataatggccacgaatcatgacggttttggggctatcacaataatgccttttttggctcgaaacatgagccctttaattatgagggagatatccatgaatactctaccatataaatgaaatgtttttcagattctggtgtcctttcagcccagggcttgtctcgtgactaagcatgcacctaggcgcgtgcatagccgcccttataatcctgacacgacaatataccagaaaaaggagctggtaacagggatcgttgacattgagaaaaagcttataaaataccatttgcttctgttggcagtgtctatttcaaaacggatctccctccccattcgcagggccaactatatcagccaggcacatccgacgaggaccgagactctgagacctactgtatcggacccaatgccgattacatgttttggtatggaaaacgcgcaaattttgacttggataggggaccatgtatattttctgctggagcaacatgatacataacgccaagctgaatatctcatagggagtgacctacggcaatatcttcttgcaattgccaacaaagaaatcaagtggaccgagcaattcgggaagccgcttgaagcggctttccacataacaccgtttttccgggagtcaactcccaccgagattacttggtgctccttaggaagtacatcgcaatgaaagatccccgagatattttgaatcgacctacccttcgccatcctggtttgtatacaacccttcaatcatcagactgataaaagctaagtacaacaatagacctcactcccagcaatgtctctgtgtgccccgacacattcaaggtcacatgcgtcatcgactggcagcatacagttattatcccattactccttgctgccggctatccgaggctatttgagaacccttcccccgagccccaataggcttagtcccgccaaaatatccagacggctatgatatcatgagtcctaatgataaagctcaagtcgacgagctcatccggcgggaatctctcttctatttataccgagttttcaatggaggactaaacaaagtgcatctcagagctctacagaatcctttgattctatcacgtcagcatctagtggattttgtgggccggcaatggtcgggcaatctcatgaccttgcgaggagctttaatgcgcatgcgtgacatatggccctatgtcccggggaatgacgacaactttgaatgtcctactacattttcagagcaggaattgaagagcagaccgagagaaagtcaacgtgggacaacttgaacatgcttgttgatcattggcgtgatgaactaggggagtctcagaggaaggctgggtccggaatgaccagtacgactatgctaccaaacggaaccagtccctcaaagcaaaattttcagaagatggcagtgcagacgagcttgagaacatcaagtgaggctggccttttcaggaccacgagttctttcaatcatcgtcgcataatgcttttttcaggctttgtaggcgcctggcggtcaagataaatgctatatatggcaaaacattcctccgaaaaaaaaagctgaagtccatatttctgcatggcgtagccatgtggcacctggcgctaatctgctagacctaattggtggctagtatatctatcatcgcatgcaggatacagggctacatcaaaatctatcctcttcaccaatcggcctcatgatcgatccatcgttcgttaccgagacgcctgtagatcttcttcaatatggcgtgcggtgggaccatgaggtgttgtcacaaaagaggagggaacagagtaccacaaagaccagctgcagccgaatgccggcaaaatctatcctcaatcaagcttggaagcaatgacgtgacaagaacggcgggactcgtcaactaaagcattacttcgtgcgagaccaagaagccctccgagcccgcttaattgcgcgattaatcctgtttgaaaagcccgccgaatcataatacaacctacagcttttctcgagaaagaagtaagcgatttacgcgccgacgagaagtagaagcgaagcggacttggtcgactaagcaggtaacccacgaacacggcaccacgaggatgtggaatatgtagggctctagggcatagaagtgggacatgtttagatgaattaatctaatttgattaattaattaattgtactttagttgagataaacgcatttaaatccaatcagtcgggttgggtgtgcaggaaatacgttgactagctaagatcgagataaaaagggagcttaaacggtccaagacaactacaacatagatacgcatttcaacagccgacttatcttcagttagttttgtgttgtaaaacatccgattggcgtttcctcatcgtctcctcagttggcgcaatagctgccagagctgctcttcagcacgcaatcacagtctccggtgacatcttgatcttggcctatcgccaactagatttttcggccgatcaccgaggctatgtaattagttggagtctgctatataagtttctccaaatcctgtttgttgggtatacacaaatatgacagtcccccaacaacggcggaaatggtggaaggtgcaatggtttgcagaccaggacactccagaggagagacggctcattaccaaactcgacttgctgattgtcccttatgcgttcctcgcatactggactaaatacattgaccaggcaaacataagtaagaaatcctccgacgggatatcaagtatgttaggtcaattctgacaacaaccagataatgcctacgtctccggcctcaaagatgacctaggtctacacggaaatgagcttgtacagctgcaaacaatgtatactattggagcagtggtcggacaactgcccttcattttcctatttaccaagctcccaatgtcttggatgattccgtgtatggatgttatgtggggaatcttcacgttgttgcagtaccgggcgaactcttatgcagagatggcagcctatcgctttttcgtgggctggtttgaagtaagtatagagaggtctgattgactgaatgagagtactgacattagccaggcgggtttcttcccggcaatgcattacacttttggtaggcataacctaatctccttgtcagaagatccatcactaattgacaataggttcatggtatcgcggcgatgaaatcgcccgccgcggaggattcttttacgtcggcctgaccttcggcacattaacagcaagtctgattcaagcgggcgcctcaactcgactggacggcgtcaatggactcgccgggtggcgatggatgtacattatctgcgcaatcatcaccctcccaatcgcaattctcggctacttcgtcctccccggatcacccgacaggccgaacaaattggtgttgaaagaaaaagatgtacagatagccaaagcccgactggcacgagtggcgcacgagacaaaagaaagcagtctctcttggcggtcggtactaagggtcgccagcaactggaagttctgggctctacttttactggatgtgcttttctggaatgggtctataaataccactgccggtggataccagctgtggctcaagagcctggaccgataccctaccggccgcttgaatgagctagctgctatttcccctggcttgggtatcttttacacgctcttcatttgcttctcgtcggatctattctttggacctgcttgggcgattacagtgtcccatatatggaacattatcggactgatcattcttgttgtctgggacgtctctgagtcgacgctatggttcgcgttcctgactacttactctgctgtcgccatgtcgagcgttctttacggttgggttaacagtcagctacgagcttctccggttgaacgcgccctaactctcatcatcatcaataccgtctcccagtcaaccacagcatggactcctcttttagttttcaagaccgttgaggcgccgcgattcaccaagggatactcatttgtcctcggaaatgccatctgcttgattttgctcgcccatgtgatccaattctttatttcacgagaagagtaagtcatccccctaaccaccaagtcaaggatctctaataaatttgttacaggaagcttaaatcgagtcgggggagcgtatccggttcagaaagcgcagatgtttcgagctatctcgaggccaatgttcaaagcgagggtgtacaggggaaagttgatacacagtcataatgcagcacttgatagcattcataaatagactttaggtaaacattacgttggaactatacaacttgattagatcactgtcatgaaaactccctgccattggcgtaaaaccagacatgattttctgtataataacagtacgggataaacacaagtcggctgtaaaacgcatgaaacaagatattaaacgacatcataagaaacccaccgcagaattctcattctcataaaaattgggttgatttacgtctcgtttgcagaagtcgatgttgtgctttatgcgtcctaattaacatacgcaactaaacatagtggtgtgccactggtgtcattcaaaagctgataaatgccaagagatatttaacccacagttctacctgaggcaccaattatatgcaaaccttgcaaacttttcaggggactttttttcaaggtcacgtgtaccccatctgtaatttctaaagccattgatccaactccgagctacaccttatctcgtgtcaccgctgggtttattgccattcctaaatcctcgacgtttacgactctcacgcctttcgcatctgatctcgtcccggtgatccgccttttcttcccaactttccgcccgtccgcctcattcacacatcatggatcacacacgcgatccctgtccctgggttgccctgagcgatttcggaggtgccttcgccatgggtgccatcggtggtgctgtctggcacggtgttaagggattccgcaatagtccgtacggcgagcgccggataggtgcgctctcagcaatcaaagcgcgcgctcccgtcctcggtggtaacttcggctgctggggaggtctcttcagtatttacgactgttcaattaagggtatccgcaagaaggaagatccctataatgcaatcattgctggtttctttaccggtggctccctcgccatccgtggtggtttcaaggccgcccgaaactccgctattatgtgtgccgtcttcctcgctgtcatcgagggtgtcggtattggtttccagcgcatgatggccgataacacgaagctcgaggtatgtggaatcttatcgccttcgattgtgcaattagacgtgtctgctaaccatgaaaattattagcttcctcccatgcctccgtcggagcagaaggccctcgcttgaataccctcctctcggtccatatcttccttcgatcgtcgtcaaaatatcctcctttctacccctgtcttcataaacatcaagtctctcttctcaggcgttcggtcgatgtcattattcctatacaacatagcacagaggctcccgtttggttcctactttccccctcgcttttaatgccgctttctacggcttgtgtcgaagcattgtacattaaacatggcgaattcattctcatggatggttttaagaccggtgcatgtcttttcatggcagcgtgcttaaaccacaagattcataacatttgttttcttcttcctttagataatttgtgaaatagacgaccaaagccgcgtatcgtacgggatcctgctaataactcgtggactgaaagtgtcacagatagcaattcagagtctacatcgggcagctttcaatcgctacgatgtaaatcggatgccgactgtatagcctatgggcctttctcgacgatccgtctgcctttacccttaggaaaccctcacataaggtcacacttgcccgagcaaactaaggaccttcattgagactattactgtggacatacaagatatttcatagtatgtatatctttttcttttttttttttttttgtatatatacacgccagcggccttccagagcttgccccagaccccactatccgcaccccaacaagacgcgatggccacttcgcacctttctactacgtatctaaaatccctaacacgccaacattctgccttacccgcgatgacaacaccagtcgccctaacacaaccaatccccggggaccgagatgactatatctatgtctacttcgggtgtaacattatactacgggacgcaactcgttatttcgataggattgcatatataggtccagggcgctgggtcggatgccaatatgcggtagacggcggatttcttataaacacataacatgccgaatgtcataataataaaagatatacggagtcgccggatgtacggcaaggttaacagaagcaaagaatgaaaaggaaatagtaaattaggattcaatagttataccataagaagtagtactctcatactttcgtcccgtctcattggtctaacaccctattcgctccactatccgcacctaagtacatcctccatggagccagtcagctttgcagtcggaattaagggttagtaggtctttctagtacttgcttgaggccgttgaaatgttcgacccgtggagtgactacgattcccaatttcgttctctgttagtcatctaaagcccaaaatcttcgactcacatagcgggtttagctgcatggaagatggcaaactctcatatacaaacgacctataggagatattctccgaaaggaaaatcgaaagcacttggagtaggtttggggtcatccctagttattggactttccaactggatgtgctaaggtcctccaggatccaaatcaatcatatgtgcgggagtcattgaccatatttctccaattcggtgcatattccttttcagatctttgccactgcttttgagccgagccggatgattacacaggagaatcagccagacgttggaggttcaagacgaggcttaccaagaagccagaggtatgatgtagattctgttataccgtaccttgaattttgtgtgtgttcctgtgatcaagtgctcttgaagaggcaacgaaaagtcaatttggtttttctttttccttttcttctttttttttcttcttttcttcttcttttccccttctaacgcagccagagaatgtgtattcctggttttggtagatttagccacaggtacatgctgccaaagagagggaaaccacaggcacattctgtgaggggtagaaccaggaaaggcaggagaggcgagagttaaacatatgatccgatatatccgagttgaccgaaggaggcgaagtactcaaccgcttgatactattgaacatgactcagcaagaatcacgcgctggctaataatttgtcgaatgacaagtcccacagaatatcgtggcaaaaagtgtggctgagttggtggattataggaacccacttggagccttgaatggatataatataggatttttggtttaaagtccgcgtgttgaactacaacatgtaagagtatcttaccgagaagttatttgaggtcttctatagtagatagcatccagaagacatattatgtataatgaacatttgaataatcggctgctttcggtaattttaccgtgcctaggaaatattgccacaggaagctgacgagaatgtaagtctatcaaactgccgggcagctgcgaaccacggtggacaatctcagaagccatgcgaactgatgtcagatccgttttttccctctctctggtgtgtttcggaagggcatcaaccttggaaagtgcaaggtggtcgaatttcgaaccaaacccgttgaatgcttggatcaatctgagtttaaagaatcgaaagctgacaaagtgttcgagacgcatgtggaagcctcagccgcatgctatgattggctaccggttctcggaagccaaccttattgatcgaaccccacatctatagaattgtagtctatccacactctatccacactcccaccttttggttcctcttggaaagttctcctcatccggagcgactccaccaagcaagcatagaaaagatggccctctgcagacatgatccccttttctttctttcttcaaacacattctttgatccttcaagtcactctcttcttgaagtcattcattctttcgaggttgatcctccattactgtcactttagtatctctgtaaatcaggtgaacttttgtcccacttccactccctcaatttacaatcttccatcatgactttcaacgtcttccttaccggccttctcgctgccaccgctgctgccgtccctctttccgctcgttccggagaatccggtgccgttcagacccgtgattctggcggcggcggccttcagatcgtgaacaacatgggcaaagatctctacctatggaccacctcgtccgatgctggctccatgcagaccatcagctctggaggtgaccacagcgaggactggaccacgaactccaacggcggcggtatctccatcaagttgtccaccagcgagaccaaggatagcgtccttcagttcgaatacacccagaatggcgataccctcttctgggacatgtcctccatcgatctcgacgcgagctccgactttgtcaaggcgggcttcaccgttgtgcccagtgactcgagctgcaagacggtttcttgtgccgctggcgatgcggactgcaaggatgcttatcagctccccgacgacgtgaacacctactcgtgctctctgagcgccgatttcactcttactctgggataaattttttttcttttcttaaaaccggcagggccgatggaattttggggtttttttggattttttttttagattgcagaacataacttcctccttgggttgttgatagactcttggatatgtatttacttctggagtcgatgtttactatttagcagtgagcttatcaagtatcactagcacaatataagaatgtgttgaaaaagatctcatgtccaactatcaagatgtaagtgtaacgctatgttcgtataattggttttgcttcaagcatatactagggacttgctattctcctgtccaggagagatgtcttctccctcctctctccagccgcagacaggtcacagatcatcccactttcgatccaccatcagtcatcgacagacatagacaaacatggcctattattctcttaagcaatcattgaggtcaatttcaccatgacatattacccctttatcccagtcaaccaaggggtaaagtgcccctcatggtggaattgactccagtgattgcccaagaaaagaaaaagaggatatggctaaagtccgtcgacaaatgatggcggatcaaaagcggaggagcatcatatgcttatgtacctgtctgcagaggggagaaggggagaagatgccaacacacgtatgtttcatattgggctggcccagttcttggcagacacgtgaaggtctccgcctcaggtgtcaacgaaccccgcaacgtaacgtggtgactaatctcggccaagtcgtgtaggccgaggctcatttcgagtctgtgaccaccgaggttgctttgctttataggttggtcgcaccccgtctgaaccttctcttccccaggttttcttcttccattgcctgcaccccacatatcttcataatggcttctcctcgtaagtgttctatatcccctatgtttactctgcaccttatttccatgtgatcctctgcatggctccatgtgggcccatactttcaacagtgttaaccgggaccgttgaacagaacaaatccgtaccccgatcactgatctgctcaagatcaaccaccccatcctgctggcaggcatgaacgtggctgcggggcccaagctggccgccgctgtcaccaacgccggtggtctgggtgtgatcggcggtgttggctactcccccgagatgctacgcgaacaaatcgccgaactcaagagctaccttaacgacaagaacgctcccttcggtgtcgacctcctccttccccaggttggcggtagtgcccgcaagaccaagtaagaaccttcgctgcggtacttttccgttgttgacacgtgctaatcgcgttttgtttcggcaaatagctacgactacaccaagggcaagctcggtgagctcgttgatattattatccaggagaaggctagccttttcgtctccgccgtcggcgtcccccccaaggctgttgtcgacaagctccacagtgccggcatcctctgcatgaacatgatcggccaccccaagcacgtccagaaggccctggatgttggtattgatattatctgcgcacagggtggtgagggcggtggtcacaccggtgatgtccctaccaccatcctcatccccaccgttgccaagttggtcgagggcaagaagagccctctgaccggccagcccgtgcaagtcatcgcggccggtggtctgttcaacggtaactcggttgctgctgctctgatgctgggtgcctccgctgtctggatcggtacccgcttcatcctggctgatgaggctggcgcccccgccgctcaccaggaggccgtccgcacttccaacttcgaggacaacatccgtaccattatcttcactgtatgtatcaccagcgatgttattttcaaggcgtccatgttgctaacaaccgatatagggacgtcccctccgtgttcgcaagaacccttacatcgtcaactgggaggagaaccgtcacgatgagatcaaggagctcacctccaagggtatcatccctgtcgagcacgatatggagaacttgcccgatgatgtcgatgacgagactttggacaatgcccgtccttggctgatgggcaaggttgccgccgttgtcaacgagaagaagcctgccaaggctatcgttgacgagctcgtcagcgatgccgctgtcctgctccagaagggcaacaagatggttgctaagctgtaaataattattccctatattctcgatctctatagtcatgttcagcgttggataataaaacttgaccggtgatattcccggccgacctttggaacttacctgaattttgctcgatgtacttggacgtcacccgatgtctaatgtaggttagcgttgtatgatcccctctccaggccgctatggaattatccctgctctttcccaaaccttccttgatccaaaaaaagctcttaagcgcctgggtggggtatcaactatcaatcaccctagttactccgtattccacgtggaaatcacatccataatcgttatgtaccggcattagttagtcaattatgatataaatagattgtctatccttatatttctcattttgcttcccgtgtcccgtgtctacatgatcggtgcttttgctcgctttccttgtgttgagaccactccaagcttggtatatctcattccgtctgtaatattcattaaatctcaactcggatcgtcctctcgctgcaaaatactcctagaaactgagtatccgttccacaatctagacaaacagccgaggtccgcacgctccattgtgttctcgatcggcacccgagcgcattagacactactgcacctataggcagggttaatccgtaagagtaaatacacacatatatggagctgcaacgcaaggtacacagaaatcccagttggttcaatccgtgtgcaggtggacctagtgggtctgacagggtgtttgtagccgtattaggcttagctcctgagactaggtatgggatgctccgagccaaaagaatctcggatttcttggtgtatcatgtatggatgttacaattacctggctgatcagctagaagtcggctcggtcaggtggaacagtttgataatcggaggtctaacggccgagagattagccaagcataggaaacatttagcaattacatgcgacataccgagtacataagaccagcacggagctcattcagagcagtggatacgttcctgggaattggtctgtgagtccaatggaaagtgaagtggagatttcaatggctaaatataaaagtcagtgcagtcggtaccattgagcaaagggaggtccgtggtatgacgtcctgggaggcgttcgctagatcgtacggaaagaacatccgtgatttgagtctttaaccttttcaatcaccgtgctttatggtcccacatgatgtgatgttttctgtacgtgttgcagctgtgccgtcttaggccctacaacggtggctgaatacggagagtttttggccaatgaggcatggatataccagtgtttttgctggatgcttctaggtcacttgaattgggattgaggcgtcgaattcgaaagctgcttgccaatcttcggtgactcgaacgcaccatagaaatgttttccggcgtttgacgcggtgtcggccggaaagccacagagactaacaatatctagattttcatgttccatcgttaatcattctctgtgtatgcgcattagtatggtctatcaatccatggatgtctggtaagcgggtcgggccggtcccatggtgaaccatcaaagacttagacagccagctgtaaattgtattcatgttgaagttggagataattccatagacaccaattgatcgaaatgatttctcaccgttggctgatgtgggccgactcggtatgggccatcggccgttcttacccgagtacacaccgattgggacttggcgaggagataatgaaaagggacagtcttggaagtcagtttcttgtgtaacacccccaattgaacggaacacagtcaaatatcgtgagcactagagcggaaagggaaaggccgtgaagtgtatatatagccttgtggagggatcatcggcgccagggaccttgaccagaactatatacggagcaactcactatctcgaagaatcgactccgtccttcgctttcagacatccgtagcgagaggttgggtgtcgataccctcgggccctgttcaactctaaataaagcactgcaagcgccgtggcggggaatgaattgaagtgaccagggggccgaggaccaatgaaccatgaattctcccacgcgatagaccggattcaaatcccaagggaatatccccgcactgtccagacgcggccggtgttcaattatagagtcgaatgaaagtcaaagcacgtcgggagtcaaagcccatggactattggccgaagtgagaaggtaggttggctgtcactgatcacaatacgatgccatgtcggaaatccgcccactcataggctcggcagtacgaaaacgcttgtgtgggctcctattgaccgaggcgtgcataattgctgcagcaaagcgggttatttttggcccatcacctcgcttttttctgtcgaagtagcctttccaggactcgcatcttttcccctgcccctccgtgcagcgctctctgcaggttctctaagattcgggcttttctttgcttttttgggattttcgatttttctctgcaattcgtcttttcttttcttttttctttttccgcttcattttttcccccttatcccgctaaccctccaattcttctgggatccaagtcgctgggacgccccctcatctccactcaaccccgtcggaggttaagccaattagtttcgcaatcgcatctgatagcactctacagtgattatctataaatacattgcaactgatatccagcctttgcacgtcaatctcgggatatcacattacctcacgggattattcgcctggagccaatcctctccccgcagctcgtcccatcgcactgttcttggcccctctatcacctccaaggtttttttcgtcacaccgactgagcccttggccattggcgcgattatattacttgcgctttcccggctttgcgctggaaggtgagcccacaaagtggcggaacccgagactattatcgtgccctagttggatggaaagtacttgcaaagtctttcaatctatatcatctaggcacactttgcagattccgggacaatgtcgctcaagcaagtatgtatatcggtgatctcggaacataaccatgctgatactgtgatcaataaggaaatcgaaacatgggtgcaggcccttgaggcctatgacaatcaggaatttgaagagtccctgcgatgcttctatatgatttccgatacatcaaagatcttgtttaactgtggagtgatctacgcaacgctaggcgagcatcataaagcagtaagtgatcccatgagaggttttcccgacagtaactgatttggtgcaggtagaatgctatcaacgtgctgtcggcctagaccggtatctggcaatcgcttacttccagcaaggtgtatctaatttcttgctcggagacttcgaagaagcgttggccaactttaatgacactttgttgtatctgcgaggaaatacttccatcgactatgaacagttaggtcttctattccgcctgttctcatgcgaagtcctgttcaatcggggtctatgctatatctatctccgccaaatgaacccaggcatccaggacctggagtatgcagccaaggaaaaggttactccagaccacgatgtgattgacgatgccattcgcgagaatgcagatgtatgttactctactaaattgctggatacaagctaattcaaatacagggctataccgtcttctcaattccagtgggagtcctctaccgtcccaacgcagccaaagtcaagaatctcaagacaaaagactacctaggcaaggctcgactagttgcggcgtcggaccgcaaccaatcatcagatcaccaatggaatccaatagtcattaaagaagccctccaaagccgcgaaaaagtccccttcgccacatccaacctggtacgccacaatctcagcagccgtactcgtcaacaatccgaaccacccctaagccgcaacgtattccccccaacaccgccaccagacgaccgatcagccagcacagcatcgggggtatccggacaccaccgatcatcatcactgcgaaatgtccgtccaccacgtctggacctagaccgcacaggtgccagcctagaccgccgacccaactcacaagaacaggcctccaccgagagaccacggataggaacgacgcgcacagcctccgagccgcgcgggccctcctcccgccaaaacgtgcgcggttacccacaggaaagccgaggcagcatggcccgcgagcaagccggccaccgcagaaacctcagcgacacaaacccttccttcccaccggaatccgagtacggccccggcgacccacacgacccgtactcaagccagcgcaacctagcccacgcaggctggggccgcgggtcccgccaccaaccaccgcaatacatcgacgaagaggaagaatacggcagcgacacatgcgacgcaacaaccctccacgacggcggcttcgagctcgtcggtgcgacccctggtccaagccagcaacgccgcacccgctctccggcgcgatactcccgccatgcgaacccgcgtaggcccgagattcagaaattcaggacgaaagtccacgccccagatgatactaggtatatcatgatcgggccggagatcgagttcggggaattcgaaaagcgcgtgcgggagaagttcggcttcaggtgtcctttgaagatgaaggtgcaggatgacggggacatgattaccatggtggaccaggaagatttggatttgctagttagttcggcgaaggaggttgctcggcgggaggggagtgagatggggaagatcgaggtgagtctatctgcactttatgaatctttgaaacatgcatatcctgactggtttcatcgtttagatatgggtcgaagagcgctcaatgatttgatgcatgattggaatttcttctctgttgatattagcatcgtgattttgtctataccctttttttacgtatttagcatgaaaatacgaccaatgcatgagagatagtgatgtaattctctttcaatcgagctcgaacttaaggaaattcgttgacggaaacataagattggagatgtcattggcatttgccctggtggcaacggaaaaacttgattcttggactggcacttttaaaacaacatggtccgcttcgcagtacaggtttcgagcgaatgtcttcgttgcttccgcatgtcttgctcgttttccaacagtctctcctgcacatagcggcttccgctggggtcgtgcttcactcgctcgtcgttgaggatgtttgtgagcgttgctttgacttggcattggtagtcgcggatttgggcattggtggcatcggtggcatcggtgatattgccaaagatgatcgacacctgggagtctttttcgcgaagtatggagtctggggtaattgacctcgtgatggcgggggttgggtttagggtagacagcttggatgctgctagattgttgtttggaggtggcgccattttgcaggttcatatgatagattggtattgatgaattgatgaatagatggaatttttggaactggtattagaaaaggagatgaagttgcttttaaaaattaatacaggcaagcccccaaactgtgtcaaaggtgacctgacgtctggcggcatatccgaaacctgcctgattgccataaaacgatgtgtttgaacatacgggtatgacatggcgggttccacgaatcagaggctagtgtatgcttggcctttgtgaagatcgtatgaccaagtagtcctagcgtgcagcgttgtcgccactggtggacgtgccgatgacaactacaatacgcaagatgctatatcagattttagttttgtgcttataattccctatcctggtcattcttatgatatactattgactttcctcaatgatctagaatcaaccggtcaagtatagtgatgtgcgttgtgtgcgtttatggagttcaggcgcgtaaggaactactccgtaggcgataatggattcattgctaaggcgctagatcggataccgaaatcacccgtgtctctcaatctcctattcagcatcggtctttgtctgtccagtctctttctcctcggtttcaaactcggctgtacctccaatccaacagccactggcattgccacccccaagcctgaacctcaaattaatctcacggtaacggtcgttgtcgcaaggctccctgatctgaagtggctcaacaggtctgtcgacaaagccatttatcaaaagcgcaaaagccaaagcagtcgtggtgtcctcccaattcgcatcaggttcaggaacctgtctcacttcgtactcctgccgtatttcgtcgacgatggcatacagacacaatccagggctctgaatcctttcaagaagcttcttgacgagatcatcgctcagcttcaagtcacgcaatctcctaaccgatctgatcggaatcagtgtcgttgagattatgtccgtgtcagcatcgtcgaccgtgccagcattgtggaccattccaggtgcaatgtcagatctcgaaatcttcaaatcggacagaatgacatccatgttttcggtattcacagtgttcatgtcacatgccaggttgaagaactcaacccagatgttctccttggcgttgtctttgtcggtggtcttcgtgatctttgcttccacacagtcgctcttggtcaagatgcggaggtcgccccgcggcatcatcccaagcttcgagagtagccacacggttccgatcattacatgagcacacttctctagttcatggtctgggtgccagacgcggatctcatagtccaagtcggagtctgctggtgcggagaagacgaacccgctcgggtggccgtaatttgtggtaagtttttgcatttcttcgtcggacaggccattggcatttaggacaactgaaattatacccttgccgtctggacctgcaggagagacccgtagaatgtgggcttggacattctctattacagatggatgtggtagagatgatgtcgcctccattgtagatggattgatgtagtggttagatgggtgagacggttttgtgtagacgcgataccactcgcgaagtgatacggtacatggtgaagagtaagagaagcaagtactaaagacaattcaatacggagtatagtaggtggtattcctctgttccaaatacggcgtaccccgtatgtataaacaaatacagcacgcgggatagaccactcgcgcagtgacgttgaatgttgatcgacaagtgtacagttgtatagcaacaacacatttcaaaccatgccactcccacaatgaccgacctaacaccaactctcaacaagctgctatcaaagcaaagctcaccactcccacaaaccaaaccctgcacagaaaccgccgacgagttcctaaaggaggcataccgaattgtaagccaccctcactaacactataccaaaagcaaaccagaaaacaaaacctaacaaaaagcaccacccagaactcccacatccactctctcctccaatacctccaatcaatccgccacgcctacctctcaacaacacaaccacaccgccgcaacccaaccccaaacaccaaccctaaaaatgcaaccccaaccccctcaacaaacctcacagatcccgaacgtgacgcagtcgacacatcaacagccctcctcctccgcgacctagcaacctcaatcgcaaacctctcctccgccgaaaccctccgccaagaaacctcacagaccctcctgcacaagaaatacggacactcggccgccggcgcactcctctggcgctgggccgggggaagcggcgcgctagacagcgccagcgacgagggcaagtccgccgagcaggtgcgtgccgaggagagcgcgcggtcgatagcgacgatccgcgagagcgtgctttggttcctgcggcgcgggctggagtgcgctgtcggtgtgcagcggcggatggtcgagaagaggattgagagggtgcgggagaaggagaagagcgtgctttacaaggttggtgcgggtggggttaggaaggggtctgtttctggttctatggatagggctggggctggagctggggctggggctggaggtcggggcgcgggttcgttcgatcctatgtcccaggcgcctgatgcggcggttctgagtgaggccgacacggcgcggatcgaggcgcagctttcgccggagcagttgcagctttttgcggaggagaatgattctatgcttaagcattatgaggatacgttggggaaggtccagtatgtttctttttccttttccttttcttatatgttatgctgggtttttgttgcataatgctaaccatgccctctttagaaacgctgagaaatctctcctggagatctcctctttgcaggaaacgcttgtctcgcatcttgctacacaggaggagcatatttcccagcttgtcgcggacgtggatacgacgcatacgaatgtcgggcagggaaatcgggagttgaagcgtgctaccgagcgacggagtacggctcaggctgttttctggggtactgtcgggctgtgtacctggcttgtggtctgggatttggtcttctagtctggtgctactgaaggatttgtcggaagctttggagagctgttttataccatacataccattatgtctatttcattgaagtgtagcattttatctcaagatctctcggggaggacgtgattgttattgtgtctgtctaactgttgagtgtatacttcccaaagaccttactgttgacggcccggtctagctaaatgaatcgagattcatccgcggactagcgtaatgcacagaccattggataaaataaccctacgttgtataacaatccaatgccgcatgctatatctatcatttaaatgatggatatgataacgcaaggaacgagaaatgcaaatccagaccgaagtccagagtactatggtaaattgatgcatcaaatgaaagtccttccgaactttaaagaaaaagctcacgttcaaaaaggatagaattaaagaaaaacgccagaccaagtctcctcgagtgtttccactatgtcaagaccggggtatcaggggtatgagggaagtatcacaaagcagactcgcgaacaacactatcaaccgcctccgcgaagtagtcgatgttattcgagttcaagccggccattgagatgcggccgttctttgtctgcgagtagaagaagagttaggaattgtgattccagacgatgtaacactgggaaaggagggagaaaaacataccatgtagatgtgccacttcgagcgcaacgttaagacctgctccactgagagacccgtgaaactgaacatcccaatctgcgaggtaatatgatcccacgaaccaggcgtaccaagcttctcaagacgatcccgtaacccttgtctcatatccaggatccgcccactcatcgtgcgcagatctgcctcccattccttaaagagaacagggtcattgagcacgcgactagcaatgcgcgcaccgtaagcaggagggtttgagatctccgagcgctgcaggatagccagttgggaggcgatgtgagaggaggcagccgcggcgtccggaccgggcgcggagacgaagtggaaggcgccggtgcgctcgccgtagagaccgaagttcttggcgaaggactgcgcgacgcacagctcgaagccttgctcgacgaagtagcggatggaccaggagtcgcggaccaggtcgccggatgcgaagccttggtaagcggtgtcgaagaaggggaagtgcgaacgcgagcgcatgaccgcggcgatctgcttccattgttcttgggtggggtcgacgcctgttgggttgtgcgcgcaggcgtgtagaacgactacggagccgtggggtgcttcttccaatgctgcgatcatgccggtgaagtcaaggccttttgtcttggcgtcaaagtagggataatgggcaagcggtaggccgacgtttgtaaaaatttggttgtggttcgcccatgttgggtttgagaggtagactgtgggcttgtgggggtggaacctggcgaggaagaggccgcctagatggacggcgccggtgccagagatggtctgcaacgtgcaaatctagggcggggttagtttggaggtttggaaatattggagtaaacagctacatactcggttttcacgaatggcagggctgtctgcgccgacgatgagtttctgagctgcagaggtgaagtcggcgagaccaccaatggagagatattcgtggttgagagtaggatcgttgtggatagcgtcatcggcctgtcgaagtatgtcagatcactgcggggacagaagtatagagatagatatagatgtagatagttagtaccttcttgacgaccgggagaacccagggctttgcgttatcgtcacggtaggcaccaatacccagatcgaccttgttaggtgaggggtcttctcgaaaggccttcataagaccaaacaagggatcctcgggtgcggcagcgacaagagccgccgtaaatactgatggattagatgagcccatgatgtgtgatgttagagaggaaagacgctcccttgcaatctggagcgaagtcatggtgaaattatataatcaaaaataccccaggtggtacaaaggtattccccggaatcaccgaaacgggatattcctgcttgcgttcaccggactggagtgagggggtggggttggctcgggggaatcagcgcgcgtcgtttgctaagcagaagaaaaaatagtatacagctgtaaggtgtacggagtacgttggtatcgtctttcattcttatattctatctcgctgcccctatcatatcctcggcgcacaagataccgagggagaacatgccgtatctttctcgttttgatggtcacatgccagtatatcgccagtgggactatgcttgattattataggaacacaaacgtacggacataaacacctgatggaaatctcaaacacattccctgcctccgacaggctgcacgcgccgattacaaacagtgtgtcatacaacgccgacgaaaaaaagacgcactgtggagacctttctggcagctaggatcgttgcatgataggtctctcagggggttgtattttatatgtctcaatggcctattaactcggtgggtatttagataactgcaggtataggcaatacctcgcaggatcggactttgaatatgaaacagttctcgcaattctagaggctccataattataaatccatgtggtatgtgtcattcccccacactcgtgaggggactaaaataactcatgaggagcatcccgggaccgagtctccgaagaagatttggggatagggcggacttgctccgattcttccccacagagaaatgatgatattgtttgtacagagatagagagtagtaagatcatataacgaatgtaataggatatatacagtacaatctaaaatatacgctgtaacacggcctaattgaaatgataacagaccattactccaaatacgcaaaacggggtatagatggtgtacggaaaccagattttgagtcagccgctgacgtaatcatcagccaatcggtcagacggtcgtgcctggcgatctcaacatcatgaggtgggtactttggcaaaggtactgaatctgatattctgatattgaagctatccggtacttatgtgctccctgtgacctggcacagcctcaaattattcaagtctacggtgtagggagaatctgatatcagataattcgatctgagtctagatctctgtccgcgtgatcgagatatgtcgatcccatctctatctctatctcaagataaatccaactgaaatgtacgtgaccctaaattcatgatatacaaaaagtatatacagagaagagatacaaataaattactgagaaaccagtctctcttttccaaccgtcacaaaacgccaatgctcaaacaatccaatggacaagaaataaaaaccaacccattgaaaaataacgccagcctcctatcgaagacctgaaatcatcggaatcataaatcgaaaatatatgcacgtaaaggagtaaaatcatcatgcagtagacggcgtgagatggacggtcgctggagccgccggagaaggcgcagtgtcggcgtccgcgggtgtctcagcctcagcaccgtgggcgcgggttcggatgcggaagcgatcgcggagtcgggtagtcaggccacggtgtgcttctccttcgggcgcaggttccccttggcttgcttcgcggacgtgtcggagcgcggcgagacgctcctcgacggtggcatcgcgcattcgtcgggcgttgagggggccgtggaggtagttggtgagacgacggtgagtatggcggtgggcttcttccgctgtttggtttggtccgccttctgcgggttgaccgggttggtcgacgttctcttcctctggattctcgggttggggtgggttcaggtcgatgcggctgtgattggttagtttgggtgttgatagttgataagttatcatatcgacataccagagtggacatgtgccggacacgttcattaaccacgggtcaatgcattccacgtggaattggtgattacaaggtagtacacgtaggtcttggcccttgacaaagtcatccgtgcaaatcggacacgagaagttacctccgtcatgcacctcggtcttggcttcgggggctgtgggggtggggcgctcattatcgtctggggttggcatttcggattcgtggagggtcgatatctccgtgtgaccatcggcctgaggctcggagtgctcgcgatcctcagggcttatggtcatctcgacatctcttttggccgcctcgacgtcatcatttttttcatcaaacttgacgaccggtatcgtgtctaacatggctcgagctatacctcgggctcgactttgccggactcgcccggcaatccggcgagggccgtatcgctcggggtggcgatgagcacggactgcacccgtgataatgatgcccaggaacagggccgtgatgataccggtgatgctgtacaggatgatcatcgctggaaaaagtcaacaaaccgagcaggatagaagaagtcgggatacaaaccagtgttcgggctgtcgcccgtaccaccggaatcactgtcggatgggacaccagagaggtacgacattgagacgatgctgatcgttgttgtgttatcgaaagcacggagtagtgcagagtagccgccttggctggtgaaagtaaagatgttgggataccggttagcaatcggatcattggaggtgagattgcagccgatagctgttttgctgtatagtagaatggcagcggatccagaggtgacgtattcaattgtctggccaacgcggatattcccggtatactcgtcctggtcgcaagatatgaaagcgatctgcgagctcttcaagtcgagcgaattgctggggatgactcgagtgacaacgccggacacattaaaggcctgaagtagtcagtggtgcccccacggacgataagagcgtatggcaccttgagtttgtcgtcggttgattgaatcagcgagttggttaaggggaccagattctgaccagtcagagtgcttccctcaatgcgaaacccggtggattggatccggacggtggtatttgatggtagcgaaacaacctcagcctggactgagaagaacaggagaaagaaaagaaacagtcccattgcgggagacggcggaatggaagaataaatgtgtggggtcacattagtcaagtggatggtgccctggtggatgagcgttgcataaaaaaaagagagcgaaactgggaaaaccagaaaatgaggggagagatcggccctaagagggccctaagaggatccaagcggataagagagattaggcgattgatttcggttattacatattatgttgttatagattgctttatcttgtagttatatatgttggagttatgttgtaggtttagggtacataactatgtcaggataacgtggttaaaatggttaacatggttaacaagggcatcctcactaccacatatacagcagaataatcattgacgatcacacttggaaacgtcatcgctggacttaccctaactacatctgcacagggcgatctttcgatgtaaatcagcatcatcgctctcgtattcgctgtcctcgcccaacttgcccagttagtgtgattaatattccggacttccgatcactgtctcagttcttctcttttaattttctgcacgttctatcttcagacccaaggcatttagcctgatcattccctggtctcaatgtggttttgatatgggatgatcctaatctgacatgcttactcgacttccaaggttcttcagctcaggattattgttccacgatcaacgctaccccgcagatacctattgaaatcaatgcaccccatgttatttgacccaccgagggaaagagagagtagaaaataagtaaagaggggtgaattgtcgaatagaccacacattagtactaagtgcatggatgtccagtctagtctcttccgaatatcaaatccggagagcgaacgggaagagaggtttaaagtatagtcctagcaccggattaagtctccgctttcttggtatgatctgatatgtaactacctatatatacttggacttatatatatcctatcgtatgagtgccttgaccctacataccatacagtccttcctcacccaaataaatacgaattcctcctgagtggcgagagtagggcctcggctctcatcaggcccggcgtgcattgtcttagtactccataacacggtgggaaaaaaagaggaaaatagaaaatagaaaacgacgaaaaacagccagaaaccaaatggaaaccaaatgagaccaagaggaaaggaaaaaccaggccataaagtaaaataacaacaaaatcgatctagatcatctccaaagaaagcaaagtaaaaaggtctggtattaatagaaacatctctgcctcttcctctgctcatttttagcttcgtccccctctctgagcggcaaaacccgcccttcaaaagttcaattctcccttccccatccttctcctccatttttgtcactctcgactcatctctccttttggggacatgtcgtgaaaaaacaccaatctgctttgtctttatcaccttcgtgggcaacatcatgcccgagaccgctaccccgagccgggcctggcaacaccgctttgacgggaagccaatctcgtcgtaagcatctttatagacctctcgggaaacgatggccgatggcatcgaccctatcaagtgcttcccctttctaatcccatatcccccccccacaggaatcccgccatcgccgaactcgatatcgaacggaatgagttggcccacacgtggaaaaggtttatcagcctcctcctgccccaggatcaggtgcaatgggaggaacggccacagacggtgctcgacgtgcagaccttgctcagcaatatcaaggcattttggatgtcccgcccccgacaacgggtctttagcgactccatggacttgtgtgatcgactcctgccgacggtgaacacgcacgcgaccctcctgtcgaccctcccggactcgatggcatatacccctttgttctacggagtgcttcaatcggtgatcaaggtgcgtgcataccgacacacaaggctacgtggcattgctaacctccggtcaggcgtcgtcacattaccctcgcgtaatggagggcctagctactgccctgctaaatattcacgatgctctaggtctgcccagtgattctagtctaatgtcaaacgccgtccaacatattaccaaaacctatgctctaatattcttctttctgaccgaattcatggactggtatgtgcggaggtccacgtgccagttgctgaacatgcatagccaggatgtgtactcggaattccatcacctggtactctatatacaactgcaagcacacaatattccatggcaacattccgagatggacgtcgacgaggaggaggaggacccatatagcgctcgggcactgtgggaggagtcccggctcagccaagtaggacgccggggaaaggaccgtcggatagcggcacagaataccatcactcgccggcttatttgggagattcagcaagacgcagcggagcgcaatcggtatagggagggccgggatcggttgttggcagagacattgagctccgtgcgcgagcaactggagccagtcaatgaacagagcaatggcattgtctgcataaccacgcctcctgctccgaatataggtaaagtcatatctgtctggagctcggttcaccgtctgacgtaatgacagacacgtcctcttttgaatggtcgcggggatccaagcgccgtctcgcacgccttgagattcaaagttcatccaagcacctccaggacttcttcgatagtgatgatcagatttgcgacttcgaacccgacgccaaagtcgtcgccgagggaaatatcgtcgcctctctacagcaatgggccaccagttcgcgatctcaggctttagccgtgggcgggactcaacctactgcttctctcgacccggtggctctaatttcggcttgctacgcttccttcgcgcggcaagctcgattgcccgtcgtctctcatttctgcgcccttcctagccaggaggtcaaagggctgaatctccaggagcaaggcttagttgccctcacctacagtataatccggcaattagtcgactggcttcctcctgtagtcgacagcgacgctgtcctggatctcagcgcggagcgctttcgccaactagacggaacgctcactagctggaaagccgctctatcgctagtcgacaccctcttacaatctgctccaccactgctggtctttataatcgacggcttagacgccatccacgatccgtctactgacggagcaatccgtgaactcgtccgcgtgttgctcacccacacccggcgtcagccccaaggtggtctcaacgggcaaggccctactctcctcctgaaggtactcttcactgttaccggcagaccgagtgccttgatcgagacaatgtcggaacacacactcatcctcagcgaatccaaaaccaacgaacccacgccgtccgaaccggtcctcacatcggacatcggagcggtcatgatgaatgcatgaattgtcacgcccagtgccgtttacgaaattctttttctgctgtttttggctaaaaaacgtttttgaagttcaagcatagatttgcgtgggttgggaatatttggatcttatgaaacaggcaccacaccacttatttatgcatgggtgtttgtcttcttctacaggcaaggctttcctgcgttcggcgttctcctgttgctttttggcgtccgggaggaccgaatggtttatttggtttctttttttttgtgcttcggtggtagtggtagacctgtactatactgcttgatagctgtgatacccatctaggtctaggattcatttgctattcttattttcgaacttgctcgtgctgtttaacggaaactcttttccgcgtcgcatctcggcactccgtatagccgatcacaatgcggggagccgatggacattggtttccgcctcaaaaaaatatttaaacggttcaccgaatgcatcaattgggatatacacatacacttacctatatgctgtaatacacacgatatacgcaatcatgaacggccacggagtttcgtcccgtctctactccccctccaccccgcaactcgccgagttcaaagacatttgctcgcgaaccacagaccctgcaacctacccactagccagcgaaatcaaatccaacatccccatctacgacctcgcggccctcgaatccaccggcctgacagcagacctcatcaaccgcctgcaagatgaatggcaccacatcctccacaccggggcgggcgtctacgtgctccggtccatgtacgcaccagcgaaatacgaaacaaccctaaacaccaccaatgaggccttcaacgcgatcatcgcgcgcgaagccgcccaatcaaccaagaaaggcgaccacttcgccgtcggcggctccaacgaccgcatctggaactccttctcaaaacacgccctgcaagacccatcctccttcatcgactactactccaacccgtggctcgcaatcgtctccgagtcctggctgggcccggcctaccgtgtgaccgcccaagtcaacgccgtgcaccccggcggcgccgctcaggaagcccaccgcgactaccacctcggcttccaggaagaagtcgcctgcaagcgctacccagccgcgacgcagctgacctcgcagttcctgacactgcagggcgcggtcgcgcacagcgacatgcctatctcgagcggcccaacccgcttcctgcccttcagccagacgtacaagtccgggtatctggcgtggcgcaagcccgagttccgcgctttcttccaggagagctatgttgcgctgccattgagctttggcgacgggttgttctttaacccggcgctgttccatgctgccggtgctaacgagatggatccccagaatgggggcttccgacgtgtggcgaatttgctgcagattagtagtgcctttggaaagcctatggagacggttgattccgtgccgcttgtggatgcgacttgggatttgctgcttgagcggttccgcgctgctggcggcgctttggcgacccaggaacttgaccctgatacgtattcgttgcagcagagggaaattagggcttttgtacaggctgttgcggagggatatcctttccctacgaatttggatcagagaccgcctgcgctgagcggcatggcgccggagagtgagcaggatattgtggtgaaggggttggagggtggttgggataggaagcaggttgttgctgcgctggagaagatccatgttgactcgcgggcgtaaagcaggggtctttcatcccttgcgctgacagtatataccagtataaattaaatatattacgtgtgatgcatctagaaccagtcgtgtgttctttttccccgactaaccgagtcctccgtcactagtcaactagactgttttgatctcaagccacccgctgatgagagttgctcattggacgatcagacctcatcgcgtgtgggggttgtagtggacctgcatgtcgaacttcgcgttggagatcttcttttcaggacacgacacgcagtttgtgcattcaatgtggtagaatagatgaagtataagcgaaatggggacggagagggtctgcagtactccgtgatatggagtcgatcggtcagatacacagactaatcaaaagcaacgaatgacgaggctggaaagattccacaggggggaggaaggggaagatggcggtctcacatttttaccctgttcccccccaacgggtcctgatgaaacacggcatgttggatgtatccatggcgttcgcgtttttcactttcagtcttccttaagtctctacgcttcctttctttcttcctctctcgcaacaccctcttgggccctagtcattcatttactgtacatatgtacatctacggctttggtttgatctctcgctactaaccaattcgccgatccacatctccacctacttgttgaccattgacattcgacgatcgactaccgagtttacgcacactgcgcacactggtccgggaatcatacgaacccataacttggcagctatcgcgagaaaaaaagtacagccgcggaggttattggttcgcccggcgagggggaggcaaaaaacaagcagcgctaccaatagttcgtgtgctataacgggactatttttttttgcgtgtctccaccatagacacgaaagcccctccgcaatcgaaaccactgtcctggtttaggggtgggcccgcattgacgcaataaaggtcctgtctgccttccaagcttctcgcgatgggacgttcgagtctttccatcaggcgactgacggctcaccgatttgagcagctgcacgacatgccggaccatagcagcggcaatgggatgctgaatcctaacgatgtgaccattgatatccctctgaccgagacgacttctcgtggtcaaacgggcgcccgtaaatggaacaccaataccagtgcccaggacttccactcccagaccacggagaaggcacctattgttggcgttcaccgtggtcctggtggtaggcgtcgcatggatacagaaatcaatgaaataaccggaaagcctgctgagtcgcccgaagacggcactatcaaccgtatgggccgtttctaccaagctgtcctgaattactccctcgtcactcgttacctgatttatgtccttccaattgcgattctgatcgccattcccattattgtgggcgctacggcggcaacgtacgccaaaattggcggtgttcatatctactggttcttcacgtggattgagattgtctggttcagtctgtgggtgtccaagctcttcgcccgttacgttccttatgtcttccagttcttgtgcggtatcgtcagctcaggtacccgcaagtatgcgcttattctgcgcgccctcgagacccctattgcgcttgtgctgtgggctgttatttccctcgtgaccttcttgccggttatgacattgactcccggtaagaaagcttccggcgacacggctcccaagtcgtgggagaagagtatcaagaatatcttgtttgcgctgctcgtgtgcagcctcatcttcttggctgagaaagctcttgtgcagctcatctcgatcagttaccaccgtaagcagttcgatgccaagatccaggtctccaagcgcaatgtgtacttggtcaatctgctcttcgaggcttcgcgcaatatgttccccgtgtactgccctgaattccaagatgaggactcactccttttcgattccatcctggttcaggcttgcaataatggtggcaagcggtcctccgctatgcctctccgcatgctccgtaatgtcggcaagaacgttggccgtgttggcgacaaggttaccgctgcttttgggcatgtggcgtcggagctgactggtaagcaagtctttaacccgactgcgacacataccatggttatcgaagcccttgagcgcaagcgccatgctgctgcgctggcccgccgtatctggatgtcgtttgtggtcgagggccgtgaagctttgtacctagaggacattgttgaggtcctgggtgttgaacacgaggctgaggccgaggagtgctttttggctcttgacagggacggcaacggtgatatcagtcttgacgagatggtcatgaccatcaccgagtttggacgcatgagaaaggccctgaaccacagtatgtacgacgtcgaccaggctatccgtgtgctggacaacctgcttctgtgtgtcgctggtctggttggtgttcttgtcttcatttctttcgtcaccactggattcggtaccgtcattgcggctggtgccacttcgctgctctctctcagtttcgtgttttccgttaccgctcaagaagtactcggttcctgcatcttccttttcgttaagcatcccttcgatatcggtgaccgtgtcgaggtcagcgacaagcctttcatcgttgagcgtatctcacttcttttcactgtcttccgcaatgttaccgatgcccgcatcacgcaggtgcctaacaatattctgaacagtctctgggttgacaacttcactcgtgccaaggctatgcacgaacagcttgtcattcccgttgccttcgacaccaccttcgctgaggttcaattgctgcgcactgaaatggagcacttcgttcgcgacaaggataactgccgtgacttccagccggatattgacatcgaacttgacggcgttggtgatatggacaagctccagctgcgggttgacatccgtcacaagtctaactggtctaacgagactatccgcgctgcccggcgatccaagttcctgtgtgcgttggtcctggccgtccgcaagatccaggttcgcgctccaggtgttgcacctccggcagcagaggatgccgacgctgcagatggcgatgacaagggtgatgatgccggcgccggtgcagacgtaggtcaccgcaagtctacccagcccggcgcggccgattcctctaagcccgatcccggtgtcgccgctgccactgccactgccgccggaggtatcctcgaccacgagaatacagcccagtcgacaggctacgaccaggatcgagcaggaacagtcacccatcgcggctccacccaaaccaacgccacacaaaccaacgccgagcgcgaagccgccatcgtcgaactgctcaacgcgcgctccccaactgtcgacatcggccgcgatcactacaacggtcacgagtcagccctccaccgcacagccagcaacgcctcccaccaaacccatctaaacgttccccacggaagcgaaggcatcaaccgcggcctgtcaaccggccaccgcaaggccggcgatcgcgcctccttccaggagcaggatacacatcccgcgctcaggaacccccaagcccctctctccccagtgcccgccggcatgaccccatcctcaagccaagtccccatccttgagacccccaagcccggctcccgtggcagcgcccgctacgagccgcgtccccacgcaagccaggacgaaaagagcaccatccagatgctgggctcccccgaccccaaccgcttcgacggctactactcccacgacacggggtacaatcaaattccgctcggcgggtacagcgctgagaacacaccgggacgcgatcgtcgcgactccaacccgaatatctccagcgtgacggcctccagcaattatcaactctctgaccgatatgaccccgcctcgtcgccgtccatctactccccgcctcagcctcagccgacggtgccacagcaggctgtgacctacaatactgctccgctgaggaagaaggagaagtctccttatggggagcatgaggcttgatcgttttctatctttgtttttgtactgactccctctccttgattacacattcttggctagctgcatctttgcatctttgcatctttttgcatctcctttttcttcttcttggttgttcatattatgtgtgtgatgtatatagattctttcctttgcgtttttgagccgcataaaaattctcctccccttcgtggtatgcggctatgaacctatgctgtcctcggtttttgggcatctaaaatcaaatctactttccttttttcaggacgattccgttggtgcttggatggccatgctacataccgatgcctcttacaacagagacaataggataggcaagtggcattggaacagaaaagaaaggtgctgggactatgctttataccaaaagaaagctgtgatataatacttaataagattgaaacgccccaacgaaaatatcgagcagagaaacagatcatattcccataacctaacacatcgaatacaaagtgatataatacaagtttgactacggagtaagtctaggcaaaatagagctagccacgtccaatcccatcttccaacctatttatttccagtctccttccatggatatccaacaggatcatccttccgcgtccagatcttggtcttcctcttattaaccacatgctcaacaaacacctcgcgcgtgtacttggccttgtactttcggatccagcgcgggtcccaaagttcactcgcaatgcctagatccttgcagcagcgcacgagcgcgttcgatcggcagccttctgtagcggtggggataccgtcgggggagaaatagtcctgttcgccgcgggcgacggagacgaggctggagagaaatgttagctagtgtttaggttctcttgttcctttcccaatacagcctggatgatgaaatcaagactgtaaagcagattgcatgtaaacgaaaggaaaatgtaaatgcgcttaccgtccattacaaacaagagcatactccctcgtcaccgtcttgggcgtaacgatactctcactccgcggcacgagaccccacccgccaggaccgaatgcgcggttgagaatgcgtcggtatttgatctccggcaggtacaggataccatcgggcttgatctcgacctcgtctggctccgtctccgccagcaggatatcggccgcttctttgggaaacggcgcggcagacagaccgtggaaggatcgcgtccagtcgattctctcttcggctgggcgctcaagctcgagcggtttgtctgataggcctgttttggagatgttttcggttgttgcgcggctgggggttgcgcctgggaggcgggatgcggggacgcctgttgggatgggtgttgaaggtgatggggtgggctttgcggcgggcgttgctggtgttggtgttggtgcgggtttggcggtgttctggtttttggtggtgtagctgattgctcttctggtcatcgggctggagaactggctgattctcatgttaggggctcttgaagagcgcgaaggttgtgtcgcattttgaaaggactcgattgcgcgccaggaccggatacgaagaggagcagacatcgtggcttgtattgttgatagcggaaggaggatggaggtcttgcgaaaagcatatatgcagtcacgtgatatggatttgatagcttcgttctgtcaatgttgggataatcgggtgaatattgagtggaatagattgcagggactatttgaacatggtattataggtagagtacattatgcgtctttggtctgtgttcgctggtcgttgccctggcgcttccagcactcgcggaaagcttccatctgtgttgactagagtcagtatgatctgggtaattgaagctatttgctattcctcccattcattggactttggaagttgtattatggttattgcagaactagccctcaatggctttaggtggaatgatatatgttcagttcggtagatttgatagctcacctcttttttgcattcgcgccagtccttctttgcgtagtaacagtcattcatcttatcctgctcagctaatatgtattagtttagcctttgtgactcaaattgagtataagttactatggcagcctgtgctgaaaatccgcttatccctgccattgcagttagcaccacgcagaccagaaacctaatacagggcctcaccaatcatccggctcatcatcatcatctgggacaacagttgtcttctccacgttgttcgacatggctgaggtataacaaggaaagttggagaaaggcggttggcctcggcggaagatggagaactatgcttatcgcatgatctgcctttaccacgaaccaacaatggcaacgccaacgggcaacaacgccaatttcagtggcaaaaggcttaatgtcctagtctattccggttcgctcaatttactcagtctggcagcttaaccgatttctaactgatgacttcttgacaggaaatggaaccaccgttgactcagtccgtcactgcctctacaccctccgccgcctgctcgctcaccgctatgccgtcatccctgtgacgggcgatatgctccttaatgagccatggatgactacgtgtgctatgctggtcatgcccggcggtgcggatatggggtactgtcgcacactcaatggtgtggggaatcggcgcatcgcacaatttgtccgtaatggcgggcggtacctcggcatgtgtgctggtgcctactacggaagcaaaaggtgtgagtttgaggtcggcgataagacaatggaggttgttggggatcgcgaattggctttctatccgggcatctgtcggggcggggcattcccaggcttcgtttaccacagcgaggcgggagcacgtgctgtggaaatcaaagtgatcaagggagctttgaacattggcaccgtgccaaccaacttccggtcgtactataatggcggcggtgtgtttgttgatgcgctgtcgctcgcagataaaggggtagagattcttgcgagctatactgaaaaattgaatgtcgatggaggagatggtacggctgctgttgtctactgcaaattcggtgatggagcagcagttttaagcggacctcatcctgagtatgttttggatttcaattgggaggattaagtcactgacttgtgactagatttgcggctgctaatctggacccgaaggagggcggtcctgaatatgcggacttggtggcggctatcgctgccgatgacaaggaacgaacggacttcttgaaggcttgcctgtccaagcttgaacttgaggtcacacaggacacgacaacagtgccttcactgtcatccttgcacatgtctggaatcgatgccgatggtcccatggatattctgtcgggtcttggagcttcattcacccaagagggtcatactgagtatctcaaggatgactacgatacgttccgcatcgaacgccctggaacatggaatctcggtgaactagaagaagcactccccgcaacatcctcggagtctagcgatggtatcattgattaccaggcaattattaagcgacttgtgttccacgatgatataccatcttcgaaactgactccatacttcaaccaccatgcattctactcccacctccgccaataccaatctgactccaagggagacgctacatcatttggctctaatattctatatggagaggtagtgactagcacgaacacacttcttgaaaagtaagcatttggtcaatatggcatttaatcggctctaacaattagtaggaacacgaagctgctgcgtcagttgccgcagggttttacggctaccgctacagcacaaattgccggacgcggacgcggatccaatgtctgggtctcaccagcaggttctctaatgttttcaactgtggtgcgacacccaatggacaagattcagacagcaccggttgtgttccttcagtacctatcggccatggccgtagtccggggaatcaagaactacgccaaaggctacgacaagatcccgataaaactgaaatggccgaatgatatttgtacgtgcgggtggcttgttttattactatgggttgttactgatagatctctacagatgcattggatccagatgaccccgaacagaaacggtacacgaagatctgcggcattcttatcaactcccatttcatgtcaaacgagtacatctccgtcgtcggtgttggcctcaatgccacaaacgcctctccgacaaccgccttgaccaccctcgccgcacgctacgcgtcgccgggagctgctgccgcttcacctgtcatgcttgagaggctcctggctcgtattttgactacatttgaaagcttgtatacccgcttcttgcgcacaggcttcgatcgagccttcgaggcgatgtattatgaagactggctgcacatgcaccagattgtcacgttggaggaggagggtggtgctcgcgctcgcattcagggtattacgcgtgattttggtcttctgctagccgaggagttggggttcaatgatcgtccgacgggacgtgtgtggcagttacagagtgatagtaacagctttgacttcttccgtgggctggtgaagcggaaggtgtagaccaaaccaaaacagataaataggtcgagacatccatgtctataactactagttcatacatgtgattttgctcatcaatatcccaaagaattaattgtagaccaacagacttaagcgggaacaccctcgaagattgtccctaggtataacaatcacttgccgtgcgagggaccagccagacaaaagtcatgttatcgtcgtcggtggccgcgaatcatagactttgtccttgtccttgaaatgagaggcctcatcaatcgaaatgttcgcgcttatacatgaccttcaatataagcccttttctcaaacaactccccattcagatatgatgtggcgatctaatgtgtatgaagacgttatatatgcagtcggaaaaaagtgcgtagtataggatacaatgtcaaggcctcgactcagcccatgagacccatcgtcggatacactcatccaccctcctcagcgactccttctccgcctcgacctcaaaccactcccgatgctccttcccgcactcgggacattggcctaagtcctgtatacgctgagccgctagctcaaggtgaatgagtcgttccacgcgatgcacatgcgggactttccttcccggtactaaagatgcgctatcctggctagggtgggatggcgtgtaaggatagtaacggatcaaggtcaagtcatatgagcactgtttactccattcagcaagccgacgatgcacattgctcgtgcgtccaattttcagcctaagcgttcccggcttggttgatgtcgggttggaggtgagagcgttcatgtcttgtgctgcacggattgcgtcgctgacgctgcgtggctgcgtgggtgggcggaggctgttgctgctttgcggggcctgcggtagtagagaagatgctatgtctcgcgctaccgcggattcagcgctccgttgtgtggtagttgtcgggggtgtcaaccagaacatgtagatatagccttcgtcatcggcactggatattggtttggccagttctgcaataagaatggatgctgtctgcgggggaactgtagacgggatccacgatgataagggcctgtctgacaaagatggtgacacttgcgcatgctgcggccttccagctgtagcgggcattgcgacattttgatttgaagaaggcggaacgccataagccgggcgaggcggtctcggctgaaatgaggtcggcttgtcatcctcgccgctgtcctctccgatctgaaagcagcagcaaaatgtgtgtttcctccggcgacgcttttcactaggcctactttgatatgtatggggaggctttggcttcgaggagactggatcgtttatctggagcacacccagtcgatccaataatgtatcgatgcttgtccttgtcttaactggggtgatgccattcgtaggtggattcgccgaagtatcttgatctttgtgctgccagcagtacaaagatgctgcatctatagcttcttgacgaggatccctctttcggggggtaggagcaggtgatggatttggagatgccaaagagcggcggcagggccgaccttgggaagtgatgcctctacatgttgtcgctgggtttcgagaatctgagcgcggaagcaaagattctggagtgtttggaatttgaggcatatatgagatgagatcaagtgaaagaatggtatatgttgtagatttctgcgacgtgaacttaaaatgagaaagaaaccattagggaaaaggaaaggacactaggctatgaattgcggtgagcttccaaaattcagcccagaggctacatattctccacttggaccacgtcagtgggacgctgggcagctgagaatagaataggagacttttgttgttgtttttttggtgatcggttgcaccgccacagtaaggcggtgttgtaagtggctgtgctcatgctcattgcctcggcataattggacaagttgtacttgattgctttcattcagtttcaatgattgacctggatataaaacttcaatatgtcttatgttaatatctttcaaaccaggccagtgcttgattctccgcttcatcggcctgtctactggcatcttcctgaaggaaatcagccctgacacagaagccatggccagcgccctcatagaccaccacttcaccctttccaataccggactcgctgaggaagacctgtttgatctgctcaatgtgcggaggtttcacgaccatatctttttctgcaagcgcaaagcttacagggattctgattttctcgatctcgccaggaatctcgagaaagctcgggtggcccgtaaatccagcattaagcagtggttttccatttgaagccgtgtctgctccggcagctagattgacgatatactttccaccccagcagaaaccagctccgtagataggaacctcggcaccttcgttctcgcgtacggacttgaagaagtccctgatgataggccatgtcacgccgaacgtattgtagtacatgaagggcaccattcctgtcagcattgaggctagatagtatctatagcttggattagtagaaagcccgacctgggcggtgttttatcgacttacggcttgataagccaagttgtgagtccgctggtattgaacagctcttttgttgcagacagcatactgaccggggccgcatgtcctgatatcatacttaacgagttatccttagggatgacactaggacataccgttcatgaactcaggtagataaacgaggtacttccccttttccgcgtagttatcggccaagattcggttgttcacaaactcccacccgaaggcgtcaggcactatgatgataattccccggtgaggtacctcatttagaggtttggtcgtgtaggcctgtaagccatggagagaggtgatttcaccacggggaatgccttgatggatatccccactaaaacaattgggacacgacatgttgcgatgagagttaactaggctgataattgcaggatgtgaagtgcaagagactccaagcacttacagattacccctctcggccccccgatcacactaaaccggattaggtcggggttgatatagatcatcaatacgagatgacatttcaccaaacatcaatgctagtgatctcgggggccttaggcctccggatagtcatagcggagagaagtgactaattccaatttccgaggccacgtagtaattagagtacagggggagaacattaaacactctgcccgcacggagtctagtaccttcagaacactctctgttcttagcatctcgacaagattagtactaataggtctctcgattgctagcacgcgagctaaagggcttcaaataacacgagtagccgtatctagcgaatggggattgggttgcttggcgagaaccgggtatgtactttgctctatcaggtgggggcttcctatttcagccgctttaatgagggcgcttggagtcagctgactcagagtagatttcagtccgctcggagatagtcacgtgatatattagtcacgccattgagagcccctggggccccgggccgtgtccacgcggattccttaattagagtttgatcagagacatctactgactcataagaaaacagggacttacgcagtgaaaatgagacgaagaagcaaaaacgcattcgatttagaaggcagatacacgcctaggaaggtctctcagtttaagaagcttcagaattgatcactgggcgggtagaagcaaatgaaaccgggtttacgaccacgtacaaaacactccccggggtgtggaatatacaacatacagattgccaggacgagaaagagagacgtgtccagatcgatctcatattgagttttattttaatctaatagccttttagttgagataaatgcatttgaattcaatggggacctaggtatattgagactgattcggctctctgcatgtctgtctttggaaaaaagaggcgattttagcggagatgcttcttggaaaaggtaagcactagctgtttcaagtcattagttgaggggccaactaagtaatttacaatagaaaagccgcactaagaaatcctaacaaattagagttcttctggtagcgatctctgtactatcggaagtgctgcctgcggaatctttcgcatgaaatgtaaacccgcaatactataaagacgccagggtctcgtctcctgaacgagaactaccaccttcttaagcccttcaatcacctttgcatcttctcctagcatcagtcaccatgtctctccctcctgccgaaaagctccctcttgctctcaggaagaatagtccgtatttcatcatcactcccaccgttgctgaggtacaaaaaagctgactataccttggcatcacagttcgcgacacgtatgagtctgcgaaagagaccattgaagccaacatatcgaaatcactcagcgtcccatggacaattgaagtgaaccctctcgcattatatccttacgcggactcgtcttacgccaaggatgacatgggtgcgatgattgtggagtaagctcacaccttcgtatcggcaccagtggatagtgctgatcttctacatagatacttcaacagtgccgcgtctcacctgaacaacgttgacgagttcgcaaagaccgagatcaacaagttggcccccaaccatgttctgtcattggaagtcgacagcacgcttgaccttaaatacaacggcgttaatttcaacgatggcaacttacgaattgtcgtcaccccgaaggggcttggtgtcaacatagattctgccctagagagcgacaatatgaagctaggactcaatgaagcggctgccaaagctggcggccaggacgacatcagctacattgctcgtgacaacatcggcaagaaatatgatccagtcatcaccaatgtgaagaatcggctggagcaacttttcggtcaaccatttgagcttctcccgaactttgaagacaacttcgccaaagtgaaaaaggagagtcaagtccccggcacaaagctgccggatagttgggaaacaaactttggcgctacggctctggagtacttcgagtcgctagctacacatcttgattggaacaactttggcaaagatgatttgctcaaagaaggattcctcgagtccgtcgacaagggcaaagtcgcactgcgtgtggtggacaagcttgaagggtccagcaactacaatgaagccaagatcgaggatggggtgctatatctgcagaccaaggcagatacttggggtgtgaacacaaatcaagcatcccagaagattgtggatctcctgtaggcaccacacaacaaatacatatctagcccgagcttggtagaatttatatttatactgtgcaatatacttcataatctcttttatagcttagtgcccatgttcacatgaaccgccttagtctggctatatgcctccagacccgcctctcccaactcgcgtccaataccactctgcttcacaccaccgaaaggaatgcgcggatcacagtcttggctactgttaatccagaccataccggactcaatctcagcggccacacggtgagcacgctccaaatcccgcgtgaagacagacgcacctaggccgtaagtgctatcgttggcccgacgaatagcctcttcctcggtatcaaaggggaaaatcacgacgacaggaccaaagacttcttcgcgggcgatgcgcatggaatccgttgcattgacaataacggtaggttgaacaaagtacccattcttgatcttctcgtcagtcggcgtgtaggcagcaccgccagtgagaatagtagctccttcgctcttggcgatttcaaagtaggagaggatgcgctcatattgcgcgcgtgtcacctgcggcccgtgggagactgtctcgtcccactggtctccgatcttcatactctccaccgtcgccttgtaactagcagtgaaggcttcgatgatatcgcggtggacgaagatccgcgaggtggcggtacagatctcgcccttgttggacatgataccgccgtgcgaccacttgaccgcctgctccatatccgcatccgggaaaaccagcaacggggacttgccgcctgtttcgagcgtgatgttcttgagagtgccggcggccatcttcataatctcccgggcggttattgttgatcctgtgaacgcgaccttgtcgaccaatgggtgcgaaacgggcgcggcgccggccccnnnnnnnnnnnnnnnnnnnnnnnnnnnnnnnnnnnnnnnnnnnnnnnnnnnnnnnnnnnnnnnnnnnnnnnnnnnnnnnnnnnnnnnnnnnnnnnnnnnnnnnnnnnnnnnnnnnnnnncgccaagggggcgcaaaaggggcgcggcgccggcctcgcgcccgtagccgttgacgatgtttaccacacctgggggaaatccggcctttttgatcaaagtaccgagaacgagagcgctaagaggggtctgctcggccggcttcagaacaatcgtgtttccacatgctagtgcagggccaagcttccaggtggccattgaaagggggtagttccatggaatgatctggccaactactccaatgggctggcggattgtgtaggcgaactttcgagatgtcgtggtgatggtttgaccaaaggtcttatcagcccagccgctgtaatagcgaattgttgagattgcctcggtgagatcatcattgagggcgacatggtagggttttcctgatttggatgagcaaattgacttttctgagtgatttgcagacataccattatcccaagcttcaatggacgcgaataactctctgctctcctccatcagatcagcgagtcgggccattaactgccctcgctctgtcgcgggaagtaatttccatgaggggtggaccagcgccgctctggcagccttcacggcgcggtcgacatcttgggcgcttgctgcttgaacggtggcaatgggtttatcggtacttgagaatagttagtgatatgtacaacagcgatttcgataatgacatacgcggggtcaagagatgtgatggtctggcctcctgtagcggatacagtttcattgttaatgaatagaccagtgggctgtctgtatttgtgcccgttaggcgtatatatatcaatgaagaggctcattttgtgagttgaacagttttcagagactccaactctcgaggcgcgtggggtctgatatagtacatttctccaatgaggttaagcccattcaggcaagtccttccgatatactctccgcggatgttcgaggttagtggatccgagattaaatgatagaatagttaactatcgtcaatttatcttaatcgtagtattttccattatctaattattccacagccatctctcatgtcagatcagggagtcatgtttagccctaatgcgccactcggagcttatattttctctcggctctgtttggctgaatatgtatgtcgcgagactaattctaattcgatacgctttggatatgaggttaatacaatcaaagaaaacaaactaacaagctcaatataactgaaaagtgacaaatatattgttctgctgcccaaatatgatatagccggctgttgatctctcgtctctggagtgcttcgtacgtacgctgctcttgctgtcacgggatcggcttgccatcttgagggtgtatgggagatgttggtgttgagtgcgcaccgccacggatttgcaacaatatggactaacagccctcatcgcttcctatttgggggctctggttcttcgcgccgtgtcggtcccaggccatttaggagggcgcggagccaatagctgttctagttcatgtatagtgctaattgactgcacggttcagtctcctcagtcgcggacaactagccctcaatggctcatttagttcggagacactgcagcttgcgatcggtctgtatataatagtaggcaaggtagtttgatcagttcgtacgttgtgctggtgctttttgatctacccgacttgttagggtgtagctaaaacccgtcttcgtggtcaagagtgcagtagaaggcaaggatggcatatagtggctcaatatgtcgtggtgtaccattccaccctagatcatcaattcgcttgaagaccaccgtgtgagctctaccgggcaaataactatatccggttgcaacatcttccaaatgtgcgtcgtgggtcagaccagattgcgggtggtgtggatgcagttcgttcgcggatagcactgtatcataagctggcagcatttcagatctttctcagtgtccgagacagcggagcgcagaaattgacgactgaagtttgggcgggtcgttgccactagcgacaatgtgatgccagtgaacgtatctgtgagactctccaatggaacaagggcactaacattgcccttggttgtgtcactaagtccaattccaagttccagggcctggatctgttagccgttctgaaaccgcgacaaaatgggtgaggtactggagcagcatgagaatgcccgctttgaacataggagcgttcgtgtacacgtcttcaagaaagtcacggatggatacattccggaatatcaatagagggtccagcacaccagatagacagtcagcctgtcttgaccttcttcaatgtgtatgtatccacaggtactattcatccaagctggcaccgaaaaggaaggaacgacatgcaaaactctaaaaaaaaagagtaaccaaacatatacgaaagcaaacgccttgatcttctgtgcattttctagattaaagctaggcagacctcactactatagagatgaggttaaaataaggtcgcctgtcaaatatctcctcaccagttatagttgaacagtgaggatcaaacacgacgatatacagattctgattggtcaggattctacaattcgcttaatttctaggctaccatggttcatttagcatagcttgactgtttgatcagaacagcttcaatctactctcattgatccttcaacctgtaatgagttctatctcgattagaactggaatttcgaaaattcaacatctacttgcaatgcggaagcctcaagatttctagaaaatcgcctataactggaaggatcaataatttcagcttggaatcacttcaaacttaatcaaagttacgtgatctacgtgcctgcctgtaggtatataagtagagccccctccccccgcgtgcgcgtaatgtaagtctgtaagtctataagtcatgaattccaaaatggcaagcaatagcacacagaacgaaactcctgcctggctgaattccgtgttccctggcgcttatggcctcattggcctagttgttgtcgtggccctggtcttctgggccattcggtacgtgcagcctgttttgatcgtattggtccgtcatgctaatgagatatatgtccagctttttggccctagaggccagacttagcgacccccaacgggcgctaacagatcatttcatccggcaagttgccgaaatcagaaaggccaaggccgcaagcaaaatggaggagaagaaggagaagaccgaggagaaggatgagaggaaaaagcggtgggcggactggttgctgaagccgttcggttagcataccccagaagtactttttggaagcataggtgttgggaaggatgtatactaaccaagagtgtccgtccctaggccttcttgagatttccttctccaccaatgccatgctccggcgcctcggcagcagcagcaacagaaagaccgaccaccccgttttatacgtcattgtggaggagtttggtgcttctacggcggaagcggaagccgagcttgaagacgtcgactgcgatggcattgtgatccgatgggtgcgtgtcccgcgcgggtaccgtctcccgcccaagtccaagaaggctagcacgttggccgaagttgtcggtgccctccagggcagaaaataaatctttgatcgtcttgtctctaccacctaccccggaaccggccgggatggtggattcgctcatcctttcctcacgcaggccgtaaccccctgctgttacttattgtatatacatgtcgcttgccatgttggcttgtttgggcccttgttggacctcgttggacctttttggccccttttggcccgtccttgtttgttctggattttggattgtttgtttgtcctcgggtgttttggagtttgtttttctttatttataccctggcgttggtgttggcggttgtgctgtttgttctgttctgttatcgttattgaaatattatttattggatccctctatgttgttggaccaaaacgatcctgatcatatcttgatcctctctccattgtagatctgcatgctcacgatacttgtgatgaggaaaaaggatggggcggcagaaacgctacccgtaagcggtcagccgactcacatatctgacagccaatcagcacgtaggatttaacgggcactcacaagtatgtaatcaacctccagggcttccaaggttggaaccttcagaaaaccttctacgcaactaatccattttaggagggtgatcacactatgactcagggatacctattaatgaggatcgtttttctatgctttcttcaatcttctcctggtcctgatgctcatattctacaagtttactcccaaagtactttccaaggctttcttatctttttctcgtgctaagctttccacccacgatcatggagcttttcttctattttctcaaacgcggagcagtagatttctaccggcaaatattcgccgatatgcttcttgccgagcacgctctgcgcgaactatcgcagcgtgaggaatcgctacatcatagagccatggccttacaaaagaccgtagctatcgagtctgatcgactccagcctgacaagaccacccctgtcgagtctaccagggccgagcttgaaaatacgaatcaacagcttaaagagatccgactgcaatattcaagaaaggagtatgccctttaccgagcgacctctgggcttccaccgtactttaaagaactttatgataacttaaggcgtgatcctaactggtttatgcgagaagaactagttcaggattgttcggatcggggcggctgttgcagccgggaatgtggatgctgcgcacagaggtatatgtttcaaaggaagaaaggcagaggtcattgcaccacagagtgccagtgctgtatcggctttcgtggcttcgagtttccagaagaagataaagaagagattagaagagacttcaaagctagggttgaactcgaggacttggcgtactttatgaagctgacaaggtggtctttttgcccgataaagcgccaaaggctttcaaaacaaaagctccggtggcatcgaattttcaccggttccaccgatgagaaagagtcatgaggatggccgtactttgcttgaatgtcgctactttgcttgaatgtcgctactttgctagagaatgatctgctaggggaatagattcttttgactagttacgtagataaagttgatggtgtcacagattagccagctattacagaagaaaatgcgaaaacattgcttcattctggcagtaatatgttgctcaaatagtccgagtgttcaggtagagattgcgcacatgctctttcccccgtgggtgtgcatgatggacttgaaggcctcgcagctttcattctcgtcgtacaatgagataatgcggattacatatctttttgcgaagacgcatagcgtccgcctggtaagaatcggagccttgggtgttctgaagctagcaagacgtaatcatggcaagcagttccagaggggagggggagtagtgctggactattctgtctgccatgagttgtagtagcccactggatacggagtacgagggaagaagatgtcgaccagaaatgacgcacttccgtacgttccttacctctggtgttgtattagtagacgaattagtcttatataggattccgatgaatagcagggaattagagctagaatagaaagaagccttcatcccgatgatagtaatgcatcctaaataggaaaatttgacccaacaaggcaagtcactcctctacagctcggaatgagtagaatcatgaatatggaaacggtaagagattccagcaaaatccaagtatatctagattatgaccacttccaattcaaccatcctcattatctttcccaaccaaatcatctcttcctctatacctctacaaacctccaaaatggcctccctcggcggaataatggtggccctaatcacccccttcacagacgacaagaccgcaatcgatccaagccgcctacaagcacacatcgagcacttgatcacagccggcgtgcacggtctcgttccaggcggcagcaccggcgaattcaccacactgacagtcgccgagcgcaagcaactaaccgagctctgtgtgaagttcgccgcaggccgagtgcccgtcatcgccggcacaggcagcctctcctcggccgaggcagtcgagctctccgtacacgccgcgcaagccggcgccgcggcgaccatggtcgtgcccccgttctacgaccccgtcaacctggaacagctgcacgagctgctgtccgagatccacacggcctcgggcctgcctatcgtctactataatatcccttctgcgtctgggatcaccctctcccctgcggagatcgctggtctgtccaaggtcggcgtcaagtacctcaaggatacctctggtaatgcgcccgcgctgacggagctgatcttcggtctgtcggatcagattgtctcgtttaatgggtgggatactttgactttctatggtcttgcggctggcgcgcccggtggtatctggggtgcggcgaatattatccccgagttggcggttgagctttatgaggcggtttccgtgaagggggatttgaagcgcgggcgggagatttgggcgaaggcttggcctatttgcaagttcttggagtctcataactatgcggctgctgttaagactggtgttgagttgattgggcagcctactgggggcttgcgcaagccttttgctcttctcaatccgaagttgacggcggaacttaagcagttgttgcagaatgctggagttaagactgtttagtattctgttctggattaagatgattgaatgtcggaatgagaatgtcacacttactatccactcaatttattgaatatacaacattggaatcttcttcgttgcgtcgtaaaagtgcataatagagatcgcagaacataaaaaagatgagaatagccacctggatcagcaaaacaatggccatatctgtccttgcttcacagtatcaacccacgatggcatcgattcaccccggttcgcggtcagatgctcatcctgcttgcaccacacttcagtgataatatttctggccgttccaaaagcggcaaagccacatattgagctcgccctatctaacatgatcataatcgcctcccgccttgcggttgacattgcctcacatcctgcaatgaacaacggccacgccgttccgggcccagtgggatcatcttgcgtcaatgtcgcactgcacgcttgaagcgctgtgataacactatcaacatgaccctgcagagccgcagggtgggtttgtcgaattcgtctgtaaaagaaaattacgagagctgcattcaatgcctccaccatgtgaccgtgcgattttgaatcggcgtggagttccaggattccggctcttgttcggcctaggctgaaagagcagatcatgttttccaggcgcgtgctacgtcgctgtagtgtttcccatgcttcgaggttcatggtctgacctgcctcacgggcaatacggaatatctccaaaacgttggctagtcttgttgtttgcgagacaaggctaagccatgtttcggtgatgccataaatttgcttgtataatgtttcagggtaactccgtgagtcctggagatgaatgtcataaagtcccgaagcttggtccttgggttcatcgatattcagatcactatctgagttttgtgtctcgaggcggaggaaatcgtccagccgaggatttggctcagtgctccccatttctgaactcggtgaggatcgtgattgaaaccgagaaccaagtgcttcaaatgaggagggagagaggttatagtcatgtagaacaaatgtgctctcgccgactattcttagccaggtgtagacatgatgcaaaagccgtgcctttttggaaatccgggtctttgaaagtcctcgaagacgtagtagccgctctgcatcaatcataaaacaccgggcgtgttgttgttggccggacatgatctgtgaaagtcagagtcattcaattgaggtcaaattgaaaacccacggtgtactgtatgagaatgaatgcagccatcagctggtctttatattttgctttcttcaaaccctgggtttctgaatgcagagaggtttgcatatggtccttggcttgcagatacgcctgggtggcaaccttccaccaatacccaggcggctttgtcgatattgccgcggggtttaaaacaaggtgaatagcagagcaggcgagcaagccatacaaatttgcaagtttggcatgactgatcctttcagtcccaagaaaggtcgagtcactgtatgtaaccaccgctgccggcacgttcaaaatcttccaaggcgacttttgccgacagggaatggccattatgtgtggaatgacaatatcctggaaatgtctaagcaggcacggagcatctttcagtgcatctatatcagtagaaataagctcagctggtgcgtattgtgttgtgaaagtctgcagctcattggtgtgatttaagtcaacgggcagtcccatctcgtggctcatatcaaatgataaatcattcggcgtactcaaagcaccgtttgctgcaaactccgtctggcctaggtcaaagctcaacagatcagaccaatggaggaagtcatcaatatgagacagggaatcaagtggactaggctcttgcagttcctcaggagccatagtttcggcctcaactgcaaaatttatatcagacttcacgggctcaatttcatgcaccagttcttgtggcttttgtggtgccgaagaaaaatcaagaaccgcaaagggtccaatgacaatgtcaccgtcgagcgaccgttcagggtctcgcagtctcgagtccacttctgccaatgatgcgtcaatagagcctgatataagatcggatccaagcgcagtgctcatagaaactctagattgctctaaaacatgttaataacactaatttgttccatactgtcaaggccatgtacctgaataaagataccggcgagtcccacgagtactctcagcctcctcgccgctatcagtgcgcatccacagtacctgatcggaatatccctcgcatttcacacccaaggcccggcaggtacgacaaacgggccgtttctggtcgcatttgacatgccggcgtctgcaggtgctgcatcctcctagcgcatgggatcggcgaggtcttggtcgtttagatgtcaccatttttgaagacttgatatatatattcaattaaaagagcttattgcggattcatttccatattagaggttgggaagtcgaagttatggccaaccccgccaatatcggaagcgccttcctagatgggatctcttatcgggctatctcctcggagtcaactgctcttgtctttcttttgacaacaattccattccaatcagatcatctcgttgtttgccataaaacatcagtgggacggccaaatcagattgggccggtcaagttgggaatacagctgtcaacccgtttgtttcgcacctgcagtggatgatgtcgtggacttggtatacacgttgagatcagaagtggccgtccaaaacacacacaaggctcgctctagataccaagaacacagtgtcctgagccgtataagcaactctgactctctttttgtagagcctttccttaccagacttgaacccagcacgtttgacagcccatgcgcaatctcctcgacgctcttgtatgaatggcgctgatgtcggttgtataagtcgttggcatttggtaaaagatctgtgcgactgaacattgacccatgacattgtctgaggaatgtcaattcggcaagcgactccgatgatcgtccgtgataggaaaccaactcagaaagcactctataccaaagagaaacaccttatgcacatctcaatccggaaaagggatgacctcggaaggggagagaccatcgggaatccttcatatttgaactgtgccgtcgtcgccttgctctatccattcttcttatccaaattctataaccacatcctaatacatacggtacaatggctcaccgcggggaaacccttcacaaagatgtatgctgcattgccgacctgaagcaaatggggagcagtcggctgtctccgatggtcagaggtgagtaccaatgaatagtttccgacgttggttcattgtgccagtgctgatgtcgatagactactacaacggaggagccatggatctaatcacgtatggaacctcgaagcgcagacccggtccatctccctgacgtatgtctagtctgaacgagaacgaagcagcctacgaccgctacaagatccgcccccggatcttaatcaacgtcgataaaatcgacacaaccgccgaaatcctcggcagcaaggtatgttatattccacttcaacagaaacgaaaacaccagtgccaactccgacaatcaaacaggtctcactcccattcggcttcagccccgctgcatcaatgaaactcgcgcacccagacggcgagctcgcgacctcgcgcgcagccgcaaaatacggtctctgcatgggcctgtcctcatactcgaattatccactcgaggatgttgccgctcagggcaccggcaatccgtatgtgatgcagatgtgtgtactgcgggatcgggcgattacggtgcagttgctagagcgggcggagagtatgtatcttggatgctttttttcatggttgactacatagaccgtactaatatccttttcagaggcggggtacaaggcattattcctgtcggttgatgtacccgtgttaggcaagcgcatcaatgaataccggaatgagtatactatcccggacgatatgtcgtggccgaatgtgcttagccacggaggggatcactcggatcgtaccgagtatggtatgtattgcgaagctgatgtggagttattgtgagggataggtaaatgctgatgttatgcagaccccagtttggactgggataacacgattccttggttgagacagcatacatctctgaagatctggcttaagggtggtatgtttgcgtggagtgatcaagtaaaggggctcgcagttcactgactattggcagtaacgtctcccgaagatatagaactggccatcaaatatggcattgacggtgttgtcatttcgaaccacggtggccggcaactagacggcatgccgtcgacggtggatgcattgcgggcctgtgccccggtagccaaggaccgaatgccgattgcggtggatgggggcatccgacgcggctcggatatcttcaaggcgctggcattgggggctagcttctgttttataggaaggatcccgatctgggggttggctgtatgtgtttgtttgtttgtttgttaattgttctgtttgctgacccatacagtataacggacaagaaggcgttgaattggcgattcggattctccgccaagaactgaggatcaccatggcattagccgggtaagtgattattggtctggtatcaaattaataaaaattaatcggaagcaggtgccgaacgatcagcgaaatccaaaaatgctatctttctgttttgcagccggacggaatcttctcgaaactgtgatacaactgcgatactcggtatttttctctattttgaggcttttatcatacacctccctttgatatgcgcaatgaggtcatgtgctgcatcctcagggcttggtatgtcagctgtcacgatacgagtacttgttccatacaagccgtgtgccaagcccttggcaacccgacagggctgaaggcgactttgccagcgttttcctggagaacgaggctgtgcaggccatacgtgtgccttgtagcctacatagccacagttagtggaataaaacaaggggaaacatggagtcgcgacgtatgttgtatgttgtagagtctagacaccgagtctactcccggggcttgtcctgactcctaagcctcaccgcacaggcaacaccgttattcgttcctatacttagtaacgtgtccacggattgtacaccgtaacctcatagtgcgtaagcgtgtccttaatctccacgggcgctagttcgttgtttcaattttcgccgatcctccacattattggaaaactacatatagcgtccttttctcgcttttctctttttctcttttctatctctacctctgtataccttcactctgaatacacgctacctccaacgtacaaccatacaacatattcatacccatacatatacataccaccaatacaaacatgttcaacttcaacttcttcaagtccgccccggccaacgagcccaccgctgaaagctggaatcccaacaccatcaccatgcagcccaccagccctgctcccccttcagccaaccaaaacgtcgtctctgaacagcctgtatgttgatatcccataactaaacaagcccatcccaaaacataaactaatatcgccttagaccagccaagaacaaatgcagctgcgcggtggtggcggtctctgctgcggattgtacgtttctcttctatccctactaataaaactccaaactaacttaacccagctgcgccggtctcgcttgcttcgagtgctgtgagatttgctgctagacgatggaataagatgagatcgggatgtggccgccgatgcgctcgtgcgacaacaatgttgatggactcggccttgttgggtccttaagcgcgtggcctcggcggtctttgatgtgatgcgatgcgatttgatgcgatttgatttgatggactccccccccccctccccccccnnnnnnnnnnnnnnnnnnnnnnnnnnnnnnnnnnnnnnnnnnnnnnnnnnnnnnnnnnnnnnnnnnnnnnnnnnnnnnnnnnnnnnnnnnnnnnnnnnnnnnnnnnnnnnnnnnnnnnnnnnnnnnnnnnnnnnnnnnnnnnnnnnnnnnnnnnnnnnnnnnnnnnnnnnnnnnnnnnnnnnnnnnnnnnnnnnnnnnnnnnnnnnnnnnnnnnnnnnnnnnnnnnnnnnnnnnnnnnnnnnnnnnnnnnnnnnnnnnnnnnnngtgggttttttgggttttgttttgtgtggggcccccccccccccccccctttttttttgcgctctactggatctttctacgctataccccagaacaatgccagttatggagttcaatttcagatttacggttcgatttgattttggtatatgtagatgatcgttctggtcatggctcgtggtgtagtcgttatatccatggaaggatgggtcgcttgttagtccgtgtgttggctaggtaaaggggcgacgggagaccgctgatcgcaatgccgcatcgacgtccgatactcggaaacccggtgcgcggccgaggattcggaggtttgcgagaagtactgggttcgtgtcagtgatattgaaaagacacagcaaacatatcgggtaactcacagtcaaagaaacactcaatgtccagagtatacgacgacgaggtcgaggatactgactccatattaccaggagagatcccaggcgaagcatagagactggaaacagtcgaccgatccggcgaaaagccatacaaagccccaaccagactctccggaacactgagcctcaatgccgacccatcaagcactacaccccgatgctctaaataaccctgcacatcatggcaatcaaaccactccccgtccagatccaacgagcgaatcctctcctcctcactcatctgcaccacccctccctccaaagcaacagcaacaggctccctctccccactccaatcctcatcccaatcctggatcccgccccgctgcaaaatccgcaccatccgccgcaggattttcccaggtctccggctattctccgggtcgacggggttcccatccccgtccctgcgcgggaagtgcttccccgcgccgccgagcgtgtagaacggcatcttggcgaattccagcacgctcccgatctcggattgcaccgtgcgtcggtaatggcggcggatgccggccatgtcgtggatgcagggcacgagcccgaaaacgcggcttagcaacgcgggctcggtgcgcgggtctgttagccagcggtaagtgtgctccaagctgaatctgtgcaggcggcgggagaggttggattcttggtggctgtatgtgtagattgttgctgttgggaggatgcggtttattagtggggatggggagcgggctcggttgtatgctgggtatgaagagggggtgccggggctcttctggggacgtgtataagatagttcgtagccgaatatggccttgtctcttgatggagcgttagtttgctggagttggagatcattgtcgttttcggatgtctgtcgggtcttgtttatttctgctagaatgagttctcgtgtgcgagcgagatagtccacgcttggctggagtgtcggttcttcgttgaggcgatcgactgcctcgtggtgggctccgcctaggagatttgatacattctctagtgtctgctctagtgcattgacgcgagatctgagagtctggatggtagtctcctttttgagacgataggtgcgttgtgcccgtcggatctgcagacggcgttcctgtggagctggtcaacggtgtctctatcgcaggcccattggatctacctcaatagcagtggcgtctttggcctgtgatcgcggccggcctctcttccgcacgggacgatccggaccagccgagattttatccgtcgcttggtcgggaatcttcggtggttgggctgctttcgttcggggtcttagccggctagacctggtgtttgttggagtttcctgttcttgtgacagttccaggtaggatcttgacgatagcgtgtccatcacgggtgcctatagttttgatttggaatatatctcgcagtcgaattgtccagatgatcagagaggaccgatatccaaaccctggatccagcctggaggttgacgttgattgcaattaattgatcactcatcctcgggaataacctcggccttaagccaacgctaatgcgcccacaggggttctccaccagccttgcagatatttgtttgcccatctccgacagagtgcaaagtaccctaaggctatgcacatcatctacagggatgttatgaaattatctcgagttgtgcacgtcgtcgacgtcacacggaaacccgttattttatttcgacacacagacctccatcgcttctcccggaccgcataacgtccggtgatacagtcagactccagaggaacctgaaatccgcggattttccttagggcctttccggtaacagtggagaataacacggtgactacaaggaccaaagacacaggtagcagctccgagatccagatcgtgctgaaattgtcagcgtggcgatcgaaaatgacatccaccacaactgcgattggctcttgacctttagctttgtgacgatcatgtcttattcttgccccggagggttttcctcatttatgcttcgacccgaggccgtgggattattataaaaccacttgatttctgcctggaacacctctgaaaatttctttcaaaccaaggccatggctctgtcgtttgtcttgggctttgcggccgcagccgttgtgctgcaggtcatccgcatggtattcaactcatggcagcactcacgacatgctaagagcttgggttgtggcagtgtgccaatgttcccgtctaaagatccttttggaatcgataacctgaaacagtccctggtagcagacaaggccaaagtagtacctcagttgtccgaggagcgggtcaagatcattagtgatcaggagaaacgcgatgtcactacattctccatctgcaacctcggtcgcacccacatctttactatcgaccctaagaacatccaggctgttctggctacacagttcaaggacttcgagcttggttctgtccgtcgaattagcttgcatccgctactgggaagtggtattgtgagtacctgctgtacctcatttatcctatctgcaacccgtattgactgtctatagttcaccgccgatggagaggaatggagccgatcccgtagcctacttcgacctcagttcacccgcgagcagatcagtcaattggacttggaagaggagcatgtgcaaaaggccatgcaggctctgtccgtcgcggacaacggatggaccgccgctaccgacatccagactatcttcttccgcctgaccatcgactccgccacagaattcctattcggcgaaagtgtcgagagccagctcggcgctctaaacggcctgaacagacccgaagactccttcgccagctacttcgacaagtcccaatgggtctgcgcgcagcgaagccgcttcgagaaacttgccttcctcgccgagaacaaagaaaccaggttctccgacaagcaagtgcactccttcgtcgacaaagtcgtctcaaacgccctggcagcctcccaagccgaaaagaacgcctcgcccgagaaatcctcctacgtcttcctcgaagccctcctagaagtaacccgcgatccaatcgagctccgctcccaactccttaacatcctccttgccggccgcgacacaaccgcctccctcctaagctggacaaccctcatgctagcccaccacccagaggtcttctccaaactccgcgaaaccatcatctccaacttcggcacctactccaacccccagaacatcaccttcgccaacctgaaatcctgccagtacctgcagcacgtgatgaacgaagtgctacgcctgtaccccgtcgtccccttcaaccgccgcaacgcagtccgcgacacgaccatcccgcgcggcggcggtccgaacggccaggaccccgtgtacatccgcaagggccagtcggtgatctactcgacgcatgttatgcagcgccgtaaggacctgtggggccctgacgccgacgagttcaagcctgatcgctgggtaagccgccggcctgggtgggagtatatcccgttcaatggtgggccgcggatctgtattgggcagcagtttgcgctgactgaggctgggtatgttattgtgaggcttttgcagcgctttgatcgtattgagaatgtttatcccgatcagaagattcgctatggtcttactttgactagtgcgcctgctgatctggttactgtgcgcttgcaccaggctgaggatgcttgaggggatgttggttcgttgcctttttatctgtccctatggtatttttcttttcttcgtttctagggatggttgatggtgcttgtgttttctttctgcggttatttggtctagttgggttttgccggctaagactgagatcggcttgaaaatttgtatatatctcttccacactggctgagtcactctgagcggtttgtgcctatatgacgagaatgacatatttgcctaggtatgaatatagttcttattattttgaattgtgtttcctgttgcgtgtaatatgaggaaacaattggcactgggaagttcatcaaatcagatgcaaggttgatcttagcactgaccgcaagtaaagcaggttctatacctaggtataggaagaacacacacagtatttcaacacatcagaattgaatttagataataagatcgaagtaaatcgagaagaaagtaatgtaataaaatacatggagtatgaataacagtcaaccccgcaagaaaacgcttacaccaaaccaccagtcaaaaaatctccccttttggcttgatccacacgagatcatcccttaaagacactgggaatagtaagggttctgcttgacgcaagtggtgccgctctcgcaagcagtggcgccggtccagttgatgccaccgcactggtaatagtgcttagcaatgttcacagtagaggagccgctggtaggtacctgagcatatgccgtagcggtcgtggtggaggtggcggcggtggtggtcgaggtcacggtggaggtgagggtgacgagggtggacgggacgacaaccgtggtggtggtcgtgggagctgacgctgcgggagctgtggtggtcgaggaagacgaggtcaccgaggtggggacctgggcggcagcggtagtggtgctggacgtctgggcagcggtggtggtggatgtctgaacggcgttcttggtggatgtagatgtctgcgcagtggtagtagcggatgtctgagcggcggtcttagtagaggatgtctgggcagcggtggtggaggtggatgaagaagaggaagacgaggaggtcacggctgaggcagtgccgtccacgaagtacttctcgaggatgggcaggtaagtcgcgtaagcagggccattgctgggctccaagttgtacatgtaagatccccaccagggaccggcagaccaccacgaggcgccgacccagacgtcgctgttgtcggacatgtaggagagcatgccctcgacggcagtctcgcagtcgctgttgacgccaccggcgaactcgccgatgaagcccttcttgttgttgtcctgcaaccaggtggtggcggactcgagacgctccttaccgatggtggtgctgacacaggtctcggaggtaccggagctgtcgctgtccaggtactggtgcatctcgtagacgatcttgtccgcggagtcggtaagggccttcaggttgtcgttggtggcgacccaggaataggcgccgctccatgcgttaccttcaacgaagatgtactggctggtggcaccagcggcacggatagcgttaatagcggcctggttcaggtccagaacgagagtctgatcaaggccgtggtactcgttgtctaaatgatattagtggattattaccatggtatgggtgcctctaggtgacttactggtatcgaagatgaccttctcgttagtggcgaactcagcagcaacggtcttccagaaggcgccgaaatcagaggtcgaggtgatgatattgccagagctgtaaatgagcaattagtatcatacatcacggtgggttctagtttgatacacttactatcttccgtagttgtgggggtcaatgatggcataggcaccgctgtcggtaatgaactggacagtctacataatagaactgttagatctggaagagaatcaactacgacagacatcacgtacagtcttaagagcggccaggtaagtagcatccgcggtgccggtcatgctggatggcaccaggcgctccatcaagaagggcacacggaagatgttcatgcccgcatctcgcaggatctgaatctgatcagtcttgggccaggtgtagtctgtgttcagagtaccggggatgctgcccgaggcaaattcagcaccggactcgttcacgccgacccaagtgaatccattggcgcgcttcttgatattagcgctctgcctggtaggaacaacgtctcttgttcgggggtatgcgcaggccacagttgcggcgctggcagccaggacaatgttagtgaacttcattgtaggttgggaaatgtaaaagagagtgagtgtcgagtttgacggtaaagaatgtgaatagaagtaaaagaatgaaaatcaagagaccagtcttgaagcttgaatgaaagataatgaatgtactgcacgaagcaagggtgaaactcgtgggggtcgtctgttatatagccataacctgctcgggggcgtcaaatggcgctttgtgtacaaagatactaacaggcattctagagtggattcattcttcggcttaattagaccgtgataccggaagcgctaaccctgagggctgcaggagatgtctgttctgaacggcgggtctctccaccaaagtggccggataatttctcagaagccactagttcgagcacaagggaccaggagcgatccataaggcatttcgatgttatccataatcaacccaatctgtcgggaattggcaggcaacgcctaaccgcataggattgcacggagtatgtggaggcgggatcactaaagggcgcaaagtcggatcggcttccatttcgcttagactcgtctccccctcgaaagagagtgcaattaaaacgagacagttctgatacacttccggattagctaacccgccttgagcgtagtggcggaaaataaggcgccggataaaatgagggctgcctcaagatgaaacagacaccatgtggtaatttgggttgaccctgagatccccggtataatttgcccggaagctccttagcggagaggctaagaagcgaagctcatatatcgaagcgagactatccacatttcggtagtcgcggacacgactacccggacaagatatgttggtgttgtatgttgtatgttgtgttgtctgctcactcctgtcgatgctaatataaccgtcgtcacgtagtactataactagcttttcaaccgtactttgcagccgcctctaatctcttatggtttagacttggatgcaaataaattagacctgatgttccaatttattttctaattcatcaggaaagttacaggagttatgctcttttgtgaccagcagtgccggcagtatataaggggtacccttggcgaaaaccaactgtacatgttaagatgagatcgatcgtcgagaacgtttcatacttcgatccaattgatagaaatcgagtgaattgtaccatttcatctccgtgcacgtatctcaggcaaaaaagggtcccaaatatgtcagtagaaacaacatataaagtagtcaatgtataaaaaggcagggacaatgtattgatctttaatgctctatttgactgctatctttttttccctctcctatgaaacgagagggtacaaagtcagaggctatcaagaggagccctacgattcgaaatgttcgcgttacatgggattcgaacaccaacacgtgggcacgtgacttcccaaaagcgtaattctacgagagaatggtagaaacgcgcgcaccctgtagccctaataaaggatctgtaaaagaaaaaaaaaataggtagcttctctttgattgagcgtgtcatccttagtgcaggggccatgctaatcttctctgtatattttcatttgaccatatgccccgaagggcgaatagatatccttaaagttcaatataacctccattttgggcaaaaaactaccgcctacttattttgtcaaagcatcctacaggctttgattggatggctacaggtggcttgtcacgtgaaatggtaggctcggattgcatccattagttaatgagttaagtgattaccgatgagttatgaggtctaagcatgtccccaagcatagacgaagctactctgtgatgttaaattcaaatgaataatcaccttgaccgatcggcacaggcttcgcgtcattgtcatacagcgtcctttcaaaatatcgcacccgtccatccggtcgtgccaggagaacagtttgtttctgtgtcccgtatgatccacaggtaaaactctggttcggggccccatttgccggggtgtagatctcatcctgtacctgcgctgcagcgatatcctctgcatcttgatcaggatcatttggagtaccgatgcgcggaacgaagatggtcttgtgcagatgttgaatgtatgtctcaattgtggcctccttctctggcagtcgtggcaggcgatcagtgctgaggacctgcagcagacgatcaatcaatgcatcctcgtcctccgcgtctcccttttgcacatgctcattaatagcagcctccatcaactgctctccattaataatcttgggccaggatctgtcatcaaagcttgtgttgctgagcccacgtgtctggttcttctccgttgccacccaagtgatctgatccatgtctgtggaacggttggagacaatggccaagggctcgttgatacgtccacacaccagactgaaaccccccacctgtcttacttctgggttggccacgatgctttgcacaaactcttcggtatcatcccgcttgtcggtggacccgatcaaccagttgttgacgatggcgccccggctgtagattccgatggctgcgctggtggagtcctcacggtagttggtaagaactgccacctttccctgcctggtgacccccatccaagtgccttgtgtaggtcgggctaggtctcgtgagccgaggacatgtgaggatggccttagccaccagcctggcgaagatgttggacgatggaggaattcctatatatggtaagcttgtggttcaccgcttagagtggcaatacttacatctctgttgttgattatgatcaacgagtatttcgggtgggaagttgagattaatgcgatacacatagtttgagtttccgaggtcctagttgaacgggcggggaaaagaggattcacgaatttaacaacggtgtgtataagatggagtagaagcaaaggttctagcgaaacaggaaatcctggaagagaaagaggaacgggccataacacgtaggaactaaggcatctcgggtgattgggccactcgttgcttgtgcctcgggcttgtccctcgtgtagcgtatgcacctaagtcttggagtcttaaaaagccctcaaatatggcaagatatatattgtctcaaaacacatgaatgactgaattattatggcacctcaaaagcaaaaagtgtttcgcgtgacgtcaacacacatccgttgattcttggggaaatgcaagcggtcacgtctgtcatggagttatcgtgaagtgatttgcgcgtactattaatatagttatagttatagttattcttctttgattctgctttcaagcatcggataccctaaattatctttgttgccttattctcctcttttttgtccgacttcaggcgttagtctcagatcagcggggctgaagacttaaatatccccagtgactttcttttttcacatcttcaattcacccaggcttcatcatgtttggaatctttgcggacttattgtcgtaagttcaaagcatatacctcggaaagaagagatccgtaagctaacgcatagctatctgatagctcggtcatcacgatcctcttccccgtctttgcttcctacaaggctctccgttcctctgacccctcgcaactcgcaccatggctgatgtactgggtggtgctctcagtcattctgctggctgaatcctggacattttttatcatcggatggtatagttcaaccccgctccggctcaagatcacaagctaatgactcaattatctaggttcccattctacagctggatccgcctcggtttcatgtcttatctcgttcttccccagacgcaaggggctcgcttactgtaccaagactacgtggatccgttcttgacacaccatgagcgggggatcgaagagatgatcggccgcacccatgagcgggccaaggcactgggtcttcaatacttctacaaggccatcgactttgtccggcagagggtcctgggtctacctccgcagcgcccgacaccccctcagccaggtgccgcttcctacgcgcagtcgctactatcgcggttcaacatccccgtcgcaggaggagctggggcgcccgccaacacaactgattggtactctcttttcagtgcggctgtgggctcagttaccactggcaagtctcgggaagtgcgggacgaggagctttccgccagtggcactctcctccagcgccagctgcagtctatgtctggaaccgagaaggctcaatttatttcctcgcagcgagaggtgctagattaccttcggtcaactctaacacaagaggagcagagcactcctcgtggtgggctcgaggctgatgaccttgcctatggcgtgccgttgcgcaagaatcgcagcgaaaactccttcgaggttgttgatgcggatctaggaagtcgcccggaacaaaagactagtggatggacatctggttggttcggcaacgagcaagattcctcgggctcatctggtactgacttcgctgcacgggctgtcgatgagattgcccgatcgcgcacaaccgggcacgaccgatcttgagagtctgaccgcggagaatgtcccgcttttcaacaggggtccagatagaataagaaaaccaaaatagaacttgaacactttgctcttgctgagagatagggatgggagacatgatagatgtttccgggttgttttctgccttgctaaaaaatagttgaattgaaacttgaatcgaaagctcaaataccactaagaacagccgaggatgtcaagccgaatccctccggtcggaggaatagccttgcatggaagagttcacgcagatgcactgcaaggacggggacggggagacggggaagtatttgatatatccctatgcttggtgtgttgagtcaggggtgcataggaataagataggagatctaataggatctgcgagatatacagagcatagtccgttatgtatctaaagtaccttgtatagttcgatgtagatgtacttcgtcgatgtagatataggatgggtcaatagtggcaaatggggcagatggggcagatgggggcatgtagagggtccagaggaagaaagaaacacccagagtcattcacgagaagagtcatgtctagtattgaaccctatagcccatatgatatgcgttgaggccgtgtagatactatctatactcatgtactaacccatgtagatctctttgtaacatgtgggtggcgttgtagacgttattctcgaccttttccacattgctctcacttttcttttgaacatttcatcaagaccttttttctagagattctcacgagaatccatcccataaaacacattcacatccaaaggtacgttggtcgagccgggacgcactctcgttctgccctttcgttttccacaaacccgaatatttttttcccgtgaattttttccctcccaccaaccttctaccctttgaaataaccctttaacacataacactgtcgaccaaaacgctgctcttgctgcgtacctggtcttctgtgtcactggaaactcgctttccttatttcaaatcaagtttcatccctttaacaacctgcagctaggtttggatgtggccttgttacgcctccgcgtactgacatcacctcgtctttttttctctctctcacctgcctccatcgcccttttcgccctctccgcgcgtttagacgtacaacctgtctaatgagctcgaaccctcctcagtcgggcaaccaaggacaaagcaccgctactcccgtcgcttcgacccagcccgcatcctctacccccctggctgcccaggcgccagccagatcttacgccaacgcaactaagaagtccgcgacggactcaaccgccgtacccgtcaccgtgggcggttcagcgcaacatgggcagtcgagctccgtatctgtgaacggcaaacccatgcaaaagcaatctcaacagtctgcctcttctggcgtgaccatcgtcaatggagccccctctgcttcggctgcttcctccggggaccactctcgcaagccatctgtgaccatcacctcgagcgggacctccggctacatgcccaacggcggtggcccggccagtcggcccaacagccttcagttcggattccagcagagttctcccaacatgggtgctcccgctgtgcccgcctccaaccagcaagctggacttggtgctccttccacaaacccgcggattacgtctcctcagacttctccctcgcctattccccagcccgcatccagcggcggccgcccacctccatcgacttaccaggcacaaggaaatgtgcccaacttcggtagcttcggagaatcggctgatgctaacgtaagtgtctctgctccttccctcttgagtgatcccggtgtacacagcgtgacaccacccgtgcgcgaccttttcaagtccttgttttcgtgttttcgacctggttttgctcacatagatgtgttcgatttcacaggcacacggtgctcagcacttgcgtcgcgagtcctcccaatccacccacagcgatatgagcaaccacatgggcaaccgctcaagctaccaaggcggtcgcggtcgcggatactcccagcccggctaccagggacagcagatgccctactcccctaaccccggtttccgacagacccccaatcagccgcgaggcggtcctaacatgggtccccagtttcacggctcgaaccagggccgtcctttggccccctacccgaactcgcctcaccaagccaaccgcagccctgccttggccaatgttaaccctaccactccccagatgaaccaggttccgatggcacacccccagatgcctcagcaaccgtatggttacggtcaacacatgggcccccaagctgtgagatcccccccttctcgttcttcccaggacccctggcgtcgtccccaaaggaacctttccagctcttggaggcgcaaagacaaccctacatactctcccgagtgccccgtggaccttgcgcctgaaagtggccagttcgaacagattctaacattggtcaaatttcaacagtcattccccaacacatacgatcccaactacgctggttactacaacccgaatggtggttactacatgggacccccgtccccccaacctcgtactgccggcatgccctacaatcctcagtacatgggacaacagttccctaaccccatgcctcaggcgacgccactttcgcgtaccccctctcaagtatctactgatcgtccaggttcgagcctcggtcagggaccggcagccactggccctgctgtcgccggccacacccacactggcagccgcgcatccaacagccccgctcccaagcctcacttcattattccctcggcgaagaagagcccaatcatcatcaaggaccctaacagtggctcagtcaagaccttcgaaaagaaccccgcctcccctgctcgtgccaccccttcgcccgtgaagctcactcctcctacatccaccccccctcctcgcactggcagcgcgtctgagcacactcgtaccgagaacaaggtgaagaccgatgaagagaagaagcaagagttgaaggatgccgttcgcctgaagatccagcaggacgaagctgctcaaaagcagcgtctggctgatgaggcttctcgcaagaccgctgaagctgcgccggctgctgccaagaaggatgatactgaatctgcccgggctgctattgaagatcttagcattaaagataaggccgctcccgtcgaggaacccaagaaggtggaggctgctacagaatcaaaggctgctgcccctgctgaagagcccaagaaggctcctgctcctgcccctgcccctgcccctgcccctgcccctgcggatgatgatgagatcgactttgatgccatcgagcgtgaaatggccgagattgaagccaaggagcgcgccgctgaggaagactacaaccgcgcaaagcaagctaaaaaggaagaagccgaacgcaaggagcgtgaggaacttgagaactacgaggccaacatgaagaaggccgaagctgaggccgaggctcgcgaggttgcccgcgagaacgccgcccgtgtcggtggtgaagcggccgccaaggaagacgccaaggatgcgtttgcctcgctcaagaagggtggctacactgccactgagtcttctacgcctgccgacagcggtgctgccactcctgtttcgtccgacatgggtccgccagccaagcctgccagtgctattcctaagaagcccgttggtctcaagcttgatacccccaagcccaccgagcccctgcaagcaaccgcaggcatgaagtctttgcagaatgccaagttcctgaaagacctcagcaagatcacttacccctcgtccatcacccctcccagcgccgctatgaacgctgctgcgcccgaaggccgcaagttccactacgaccgggacttcctgctgcaattccaggccgcctttaaggacaagatttccttagactgggacgcccgtctgcgggacacagtcggtgacccatctggatcccagtctgcccgcactcctggcttaggtagccgcggtccctctcgcaacggcaccatgggtcctactaccttccccgtcatgggcaacttcaacacaggccgacctggccagatgcccgctatgggcagcggatcactgaccggccgcagcgcgtccgcctttccatttggacggggcggcggtcctggtagcatggctattggaaacattcgccaaaactctgccggtgttcctcctcgtggcaactcaagcaagggtccccgcaacgacagccgacagaataagaataagcacggcggccgacaggatgaggcacaaaacaaatcgatgcctcttaccgctggcatggatctgaaggctattcaaaccaccgcgactggctggaagcctcgcagtgttggccaaaacgctggcgctggtcccgcccctggtggtgacggctacttggcaccggatgtcgtgcagcgcaaggtcaaggctgctcttaacaagatgaccccggagaagtttgaccgtatctctggtcagatcctcgagattgtttcccagtccaaggatgagtccgacggccgcaccctgcgccaggtcatccaactcacatttgagaaggctactgatgaggctcactgggctcccatgtacgccaagttctgtaagagcatgctggagagcatgagcccagaaattaaggatgagaacattcgtgacagaaatggcacagtcgttgctggtggaagtttgttccgcaagtacctgctcaaccgctgccaagaagagttcgagcgtggctggaagactaacctgcctaacaagcctgagggcactactgaagaggtatgtcgttctacatctcaacgttatttttcccgtatactaataaccgaccacaggttgcaatgatgtctgaagaatactacatcgctgccgccgctaagcgtcgtggtcttggtctcgtcaagttcattggtgaactttacaagcttggcatgcttacagagcgtatcatgcacgagtgtgttaagaagcttgtggactatgagggtattcccgatgaagccgaggtcgagagtttgaccagtctgctgcgcaccatcggtgccagcctcgatgcctctgagaagggtcctgccatgatggacgcctactttactcgtatcaacctgatggttgagacacctaatctgcccagccgtcttcgtttcatgcttctagtaagtttatctctatctcttcgtcttatgagggggaaatagaagactaacatggttcttaggatattattgatctgcgtgccgcacgctggaactctaaggatgccgataagggtcctcagaccattgttgagatccgtgaggctgtaagtaacctttattgctatgttccaatgtctctcgctaactcttgaaacaggctgcccgtgcccagcaagctgctgaagctgagcgccagcgccagtccagcaaccgtggaggcggtggccgcatccccatgggtcgcggtgacgcccgcggtttcggatacggaaaccaagcccctcctcccgattatgcctctagcaaggttggcaccgacgatctccgccgcctgcgttcgactcgcaacaccaaccagcctatgtcattcggtccatccagcctactcggctcgcgtaccaacagcggccgcaagaacctcggtcccggtggtagcctggtccgtggtagtgacgacagcgctgccagcagccgcaacggcactagcggcagcaagaaggaagacaactcttctatgaatgctttcaggtatgcaacccctaacccttccctgcaaaaatcctcatgctaataccctttccagtgcgcttgctgcccttgaagatcgggataacatggctacctcgccaccgtcaaaccctgcatccccgatgctcactaagtcgcagcccgcggcagcggagcgtcgtccctcaaaaaccccgtctgtcaaggacggagaatccacagcatagagagtccttaggagttaatgatcaacgctttccattttcttggttcacaaaaagatttcctcattttcgtcatgtccatcttgttctttccccgtgagggaagccatgcgcctttgttcttaatcggtcacagtcctcgctttgcattttccgactggtcggttatcccctaggacttgtttttcacgctttatcacggccggtttttacttttttgaacttctttcgaaaaagagacccaattcatagtgtacaatcttgacatctttttcaattcttattcttgtttcttattcttgctttctccttcttttctttccattgaatcgagagatgggtgtggtccgtggggctgtgcttgagagtaggactttgctttgcaattggacttgctcaatcacttctatttcataattcttgtctttcttttgttccccatatgcaactcgcgtaggggtgggaactgacaagagattgatgatgacagtgatgaaggggttgctgtgttgctctcttttcctcttcctcctttcttgtgctttgcatattctcttcgctcttgttatttgctcttgcactttgcttgtccttgtcctcgtccttttttcccaatacccggagctccactcaactttagtgtaattgaatgaatgcttcgccttctggctctttctaatctcttcctttatgactattgagctactcgtagagttctgtattagacgtgactatagacttggaattttcaacaaacaatatagcatggatcggtgcctatacttacttgggtatactacgatgagaatagtcggccgcttatgttgttggtgtctttatgtctttatcaacaattctcccgtgttggtattgtagaaggataagaagaagaatcatccgcaaagaatagaatatccgcagtgaacaaagtgtaaagtatgaatattgactacgagtacacaggtagtttacaagaaatctgcacatctatgggattaagcaatcaatgtctatgcatccatttagcgaattcaggctgtaggcacaagagggagagaaatccacatggccagaacatgtgccctgtctaaccaggtcggaacatatcttaaaaaccataagtgatgagggtattgagctgaggtataactgtcagtcccgtcgcgagccgacgtggttcctgacgttcattattctgttcgagagagaggcgctagaagtagcaagggatggttcgtatgcatcgtgggtatctgagaaagcgcgatgatgtaatgtatggcgccaacacgagcgaaatgggagaaatggggataaagagccgccgcggagcaagcaatgctgtcaggattcagatcccttcttgttgtcgtcttcatcgttgttctctgacacttcaatcatcgggattgacacgggattcttgcttgaatcggaaggctcatcctcctctggcttgtcagcctcgggagcggggtctggcacaggagactcgagttgatcggatggagtaggtgaggccacggtgctctctagcaaaggagatggctgggcactactgccagcaatgacgctctcctgggagctatctgctgaacttgcaacacccggactcgccataaccactgcatccagtgagttccgaataggataagttgagtcggagtcatcgtggctaacgctactacggtctgagaccgacaaagaactgcgcgaggccgtattcgagtatgatgcagggagtccgagtgcctctgccactgctgcctcctcgtctggcagcttcgaagtgctgctatcgttgctagcactggcgccgaatatctgactgccgcgctgttcgctcatttccaggatatggttgtagctgcgtcgtgttgggtctgcacggcgctttttcttcttcttttcgcgcttcgttgaaggccgaacgactatcaccgggatgggggattgctggagacagtatttggagacggagcctgggagcagactgtgcactcctttcaagttgcgtcctcgtgtaccgacgacaagcattgcaggctcgtatatgcggatctagagattgttagattgttaggaggcaacaacggggttcttggaagcttaccatgcgttggaggatgctctcaaccttgcccacggcaagttccaggaccaaactgatggccttctcattctggctgttcttccgaatcacctgctcaaatagcttctcggcctcttcgcggtactttcgctcttcaattccagcgtcgctggctatgctcgagtccttctccaccgcccgaagacagacgatctcgtcgccgtcatccaccagctcgtcaatgagccattcgagggcgaactcggagtagtcgttctggtccgttccgcacaaaaaggtcctgctacgacgcgtgcactggtagcctttgtgtttatagtttaatgtgagggagaaatcggtcgcatcgaaattgtcgaacgtgtcaaaagagacgcctcgctcgtaggttctgccatacattagtacaggccatttcagtgtctttgaggggagcatacttcggtggcggtggagacggccctcgattcaattgggcagctttatgttcgcgttccttttcctccaatagttccctcgacggggtatccccgtatgacagtcgcttctccttgaagctcgatgggcgactaggcaactgagcctctgcaatgctaaactggatcgatctccgttggttcttgggcttatcctcactagagaggccacgggtgtgaccagacccagctgagatcgtatgatctccgagttcaggtcgctctacagactcagatgagactgtaggagaagttggcgcagacatcaggaagttgatctttggtgatgtaaaggaacaggggtataataggtctgtctattggtttgcgtgggtcgtgtgttgacgtaaatgacgaaagaccagtacgtatcagcggccgcgcggttgttgggggttccacaggaccaagcagggttttgggatcatgttttggagttcttgcaatataaattaggaaggttgatcatcacgagtcatcgtgctcgcgcggaatgacggatgcagcgaggggtcaaccgtcagggcggttcagggcggtgatcatttatcgatagcgggagccctgcccgcgagcttcattgtgcttatgtaatgccagcttgggtccacacaggcacgtgtccacgggtccggtgattgacataaccctataatgactgaagcttcatttgtgttaactacgtggggatgccaaagaggcgatatttagtgcccagtatttctttccaaagcctcagctgtcgagtagagcttgaagaaaacttgtccacgtgtttataaagggaaattctcaatcgcggcagctttaacaatctgtatgattctcagctgttttacgattggagatgatttctgggggttttgactcttgtgacatgatgagcgtgccatgaacctttttgctttctttttttcttcagagctaaggttgtttcacatgagaaagggatggccgcaacacaaacaaagaccaatggttcgttatatcattgggaagcatgataaagttcagagttgaagtgagcaatatatgtagctgaatgatctaaataatccgaactacaatggtatcaatctaattttccgtgctccgtacaaagaccagatctgttagggcataaagataaaggaccaacctactatattaagtaaattccatagcaatcatactccatacgtgatataccccattcccgccacccgtagacttccaaggtcctgatacgaaagctgactaatttcaatctcagggtcttaccagcacctaaactgccagataacggaaagtgctgccagataggggaagaagatctattgagcgcccaaccaataaaagcgcccaacagcggagcatacccgaaacacccccagcctcaagattcccacccactagcccaatctgactccccctgccttacctctaacaaagccaagggacccattcgaagcaaaaagaagcgatggaaaaaaaaaaacgagacaagacccagccccttcgtaacccactcccgtggagaacatggcctgaataatgagctagtaaaatccttcagctgactagcaacctgtcgcagcgccctatgccgacctagccgcgatgatctcacgtcttggctctgatctatctctcttatccggcggtgaagatcatggcgtgctggccggctgccacttctatttggctggaaacggattcggcgcgctcggggcgtggatcgacgtggtcacatgcgcgattctgccggttttggggatttgctgtgctacgacgaaggtacgcaatatggagattaagggagtacgtggaactggtacgtggaaaatgttgaggattttggaatttttattggattattttttttttttttgtgggggaagtgaagacacttggtttgtgtgtacattggttgggctcacaatggcttcccccgtgtttcaacgatccaatgcagtctcgacctttccagggagagctggaggttgggccactatcacagatagctggggatgtaagaaaaatataataaatgtccatgtgacatacaatgagatgtccaaagatggagattcgccaaaacgcgaccgacagaaaacgccagaaaatagaaaatagatgagatgtcaattataaattcgctccaaaaagtatcgtcatagaaagcatcagggtatcacgtatgtatcgctggatgatggtacacaaggcagagagaggggtagagatgagagtataagtcggggtcgtaacggagtggatatatgagggatcgagcttattcaataagcctcgatgatggtctgctcttgtgcaccaaaataccccccctgctcaaagagatggggttgatcggaattcgccaaggtaatagccgtagtagtaggctccttttcatgaaacgactccagcgtcggctggnnnnnnnnnnnnnnnnnnnnnnnnnnnnnnnnnnnnnnnnnnnnnnnnnnnnnnnnnnnnnnnnnnnnnnnnnnnnnnnnnnnnnnnnnnnnnnnnnnnnnnnnnnnnnnnnnnnnnnnnnnnnnnnnnnnnnnnnnnnnnnnnnnnnnnnnnnnnnnnnnnnnnnnnnnnnnnnnnnnnnnnnnnnnnnnnnnnnnnnnngcgggcgggggcggggaaggcggcgtcgcctcgtcctcggagtctccatccaagtcaacgaggagctcgggtggtgactgtcgggatgacgagcgagtcaagctcagctcgtccgaatcatctgcttcgtcgtactcaaagtctgagtctgtgtcatcgtcgtcgtcatcctcctctaggaggtcctcgaagtgagccacgggcgatggggcgcggcggcggggaggagtgttgatgatgaactcggactcgtcgtagtcggagtcgtcgctgagttcagagtccacatcggacgcatcctccggatcccagtcctcctcgggctcttcgaccacggtcgaggcccactggacatgttgccgagaggaaggagcaggggcagaagccttggtggctccgttgacggtctggttgaaccagcgttcttgttcacgctcagcgtcggcgagatcgtacattagtgagtcgaggaggttggcgtggccgacaagcagacgcaggtcgtggtccgcccgggaagcttcacgggtgagcttcttccgggcggtgtgagcaaggtagtatgtttgagtgatgctcattttcttatcttgacggcgacggaggagagaatcgaagtagggtgaggattcggaggatgggctgggggatttggaggtagaagaagagtccatggtgggccagacgagctttttcagggatattgggtatgactctttggtggtgactcaattaggcgtcatccagtcacagtggatcgttttgaggcggtgtgatataagggagaaagtcggtgttagattggattcggtatacatgaaagtatagacaggtcgagttgtgatttccaagggggaccagatcgatagtgtagcgggtttaaaaagggaatctcagatatcagaaacacctggacaagaggtttatatttaatctgacaaggcagcgttttctttttttcttttatttttttttagtccgatcgacccgatcgacccgaaacggactttacggatgacgagagatccaccggaaataaatggagaaaaggtatacgccgagcccgagtaaatgagtaatgcactggtcgcttccaaggttccctgggatttctagatcctcaccgctacgttacactttgtacgtatactttagatattgacagtaaatattgattagtattccgtgcttataattcaattcaaatctaattaactacgaaagttaatacagtgagtcatctaaagcggcactcggatggccaatacgccgttctggtccgcatcggaggatgaaaaaaccgatcggagtttcggtcgcacgtctgccgtttatttgatttgaattcttttccttaattcctaattcctaattcctaattccattatttcctattcgggctatatgtacctctgcgacctagtttaccaggtactctgttgattactgatataacaacaaggttcccatgatccttggaactcatatttgtattacagagcattcgatttctaatcctagcacgccaaatcatatcatcttcgatacgatctgacaattgctgacaattgctttgaccccgcgacgtgtcaacatcctatctagcatggaggctcttggaaccttggaagccaagccacattgctccgtatgcgtatcctgtgttatgcaacactacccctcgcctgtgttctgtccccctagacgagtacgacatgtgcccagccttggcaggatggagtagcattccccaggaattcgtgattgaccaggaatccatgtccgaggaggtacggagtacggagtagggctgtggggaacacacaggaggttctgactaatgattggcaagaattggcgcatctcattggtccccacacgaaatctgctcaccctgcgccctgcaaggagggggtgagattaggtgtttctcgcctcgcgatacaggcacaatgtacattccttactccgtccagcatacttggccctcatagcgtgtttggcgtatcgcacagactccaaccctgccaaggtaaggccctgtttttcagatggcagccttgggcttgtccaggcaggcgatcttggcggcttaggtaagatccatgcggatatcaccgagccaagatccgaatccacggatgcggctttctgatgacataagcactcaaatgccacctggcctggtggttcgctcgcagagcttacccttttaatctccacttgatatagccctacggactagccgaatacgaagatcccaatacatattgatctggcctgattgtttcattttaactctaggctgctcttatgtcttaggctaccatatcatgcaatcttttctcgattttccatcaatatcaatctactctgaaaattacccaattaggaaatggtgaggtcaacaggtcgatccagccacaggccagaacaattcaattcaaggtctatgttgtggggatggatcggagatcaatacaatagtcatcatcatacttttacttttattgaaacgccaataatcgacagcggatcctcggctttttgttgattctccgagatccactgtgcttgacgagtatcagagtatgacatcaaggacttgggcttcggcaatttcttatctgttatttattgccgagagatgattctttgatgtgtattagaagtggattgccaattgtctaggcagttgatatggttgagatggttgagatgatgtggacgacaacacattacatgtacaacggcctgatataatagtcaccaatcaaagtctagataaccacctgcctaaaataggtgacgtgtatcttgcggctgataatgatatgcataacatacgtgtgtatgcacataatctcatcttaataaccaattcacaatttatgcacacaatctccattaataaccagtgcataaacataaaattatcccacctaattaggtaatgtccctcgcaagcccctccaaggctggaggcgaccaaattcctccgatcctcggcaaaactccatccgcccaggcaaactccgtatccgagttccgtcccaggggtggatcgtgcactgtgcacaccttctataacatgcttccccaatgcacgtcgccagttcacgctagagctctctggctttgctcacgtcggctatcaccttcattcacgggtgatcgacacgtgcaaaagacgcatgtgactcgatctcgggactccgttgccggtgccggaatggatcttcgtccaccgctagatcgaggtttgctggctatacggcacatggccacggggctggccggatggaatggtccgtgtggattcactacattttgtacggagtaactagctaactagaggtcctcgcctcgtgactcatggctttttttttcttctagtccgtcatgcaggtcgcttagcgtgttcctcgctgccatggggattctcgtttaagggtccattcgagctgagctgtcggccgctcggatatagctcgggctttgttagttagttatttaattaatcatttatgattgtgcgctctgatcatcttcagcttgtaagcacgtgaattctagaacaaaaaaacacatacatgtccggaaaaggaataggatagcgaggtgggtaaggccaaagtcagggaaacaaattttcagggcgagatggacgctttgatcaatctctggcctctttgtgcctgtggagacacccgtttatcctttgatgtagggcagtcatggcacgtgacagcgatctatatctacatagccaggtcctacgtgaacatgaataccataggtatacagattacagagcactaaagtagaagaaaaacattcattcgtgagaactgacgaataggtgatagtcaagtgacgcctaagcaacgcctaagcgtcgcttcagcaacgactggacgagacatccagcgctgcttcggcgacgcttagacgccgcttaggcgccacaggccacagactcgagccggactcgaaccggactccagcgagccccagcgcttgcacattcaacagcaaggcgcatcccaccctcgccttcaagccttccaggcttctcactccaggtacacattctggaccatctcattgccgagatgatcgataacagagaccgaattgacggggtccatgatccggagatcagcataagcgagggcccggtcaacggtggcgtcaacgttgtacaagtcgctggcgtagccatggaagcgaagcttgtgaatagcggccttgatccaggtgacgcagttctggacaggctcagcccccttaatgggcagggggacagaacgaagaaggatcttgatggagtcggggccgactccatcgttgacctcgccgattgccatgcggatcaggagagagtcgcaggaggccgggtgaacgttgttcttgacgcggtaggtccattggtaatcggggttgaggtcgcgtcggtacactgggtcgggcgaggctccgtcagtcacgtcgaaggcgtagtagcggttgtttggtgcatcgaagaggaggatggcccagtggtaagcagagaagcctaggcgtcgtcggtattcgccaagagagagctcgcctcggtggtagactgccaggaagacttggtagactctggtacctgggggactcagaatcgcgccacgctcgacgggagcatcgctgaactatgtgggtgctcttgttagttgctattctgagcttcagttttgatggatcagactcacaggaagttcaattggaaacattgccatgttgctcagaatttgcacggttgtgtgggatgggagatggatgagggtttgtttactggcttttctcaggtcgagcacttgagcgggcacatgagcgagcacctgagcaggaacccctctcagcttttatttccctttctggctaccgcctgaatgccattgtcaattgcaattgaatcgtcggtgcctaaccaagatgtctatctgagaccgccagcctattgatgattgtggcgaccagaaacggggatttattcgattttatatcgcgggtttatagatatctgaagctatacaaatgccggcgcacggaccatccgatatagatcgaagcggcccgtccccttcgatccaaccataaaagaccgaagctacgaatagtaaattagaccaatttggtagtttgattgattaaaacaaatgagcgacatgtaaaatagttatgtttcaatctaaaatgcgcactagctctaggtatgtggtggataggaccatggtctgatatttgcgacaccctggcacaaacatacaatcacactttgggattgtataaatgctggcaactctggttattgaaaagaagataatcacttgtattctttcaaatgttctaaaaccatgcatatagtgaacgagcgacacacaatccttttgtgaatatcctaggtgaccaaaacacagatagaagttggctgaatatattctcatgtcgtagaacagtaacctatgtacattggtctattttttaaattcaataataggaatgcgataagactttctttcagaattaaggtaactttctcgataagacatgggccagtctcgggctacatatagaaaagtcgctggtccttcctatacatctaaaagacatctcgagagaatatccgaaaacacatcgaagtgtttttacacatatataggagatacctaggtcgctgagctgtacaaacaatctgctcaaccatctcattgatatagacataaagagcaaaaataacaaaagagtagtctggacatagaatcatagagaaatcccaatgtcacgcctgcctgaaataacttggtacttgatgtcaaagtgatcagtacccggttttcaaatctgttaaacagactctgcccttatccacctaaggcagagacaagaacaaattcttcaacttgggatagttaggtgtgcccaatccagtaacgggatcccatctgcatagtacgtcagtaaaaagcccacagccaatatataatattgtactcaccctggaatagcgctgaagccgtccgagtcacatccagcactggtcccgttggtgatatcgttaagaacctccgggtgagcatagagcacagggttcacgaaaccaacagggcgcttgcccctggcaagccgttcttcgttgatctaccaagagcagatccattagcacagtcgaaaaacaaattcaaattcccgacttaccaaattcagaaccgaagcgaacaatggcgacgccaaactagcgccatagaagtggtgcagcgctccattggtgtaagcagggaacaaggcaccattggccgacacatcgggataagcacggccaatacggttgtagagacccttggtcttgttaaggttgacttcgaactcggaatagtaggggtaagtcagcttggccttcttgaagtacttctccacggctttcctctggtacaaaggctgcgggaagtagttggagaagccgcccgagctgctgaagttggcggcggtaccacccaagttagcgtgcatcacgctttcggcatcgttgacggtctggtccgcgtagagcatggtgcctccgacggaggtcacgtaggggcagttggaggggtattgggggttgaagatctttccctcgggtcccaggcatccgttggcacttccgtcgccgtggaaggaggcgactccgtagtcgccagaggcgaataggatggagtggccctgcaggccgagcttcaggaactcattgcattggcgcttggtgtatgcgacggggagatcggcttcggcttgtccgtaggaggcgctgatgacgtttgtgggcttgtacacaccgcattgaagcttgcctgtcttgtgtgagccatcagatcagtccgtttggtggaaattgtatattacccttgtagccaccaggttggggattgggatagactgcgtcgatatcagggttgtcgcccttttcaccgaaggcactgtatgtgcagtaagactgaaattattagcaatatgcatttatcttcagcagaatatgacatacaccatcgagagcgtcaaggaaagtgttgaacaggttggtggtcgcaacctcttgcggttcatagatttggtcatcaacctggtaaagagtcacggactgggggtagataagggcataactggcgatattagcaaataacagagaagcaagtagaaaagaactgtacttacgccatgtcaatatcaatatccgattcaccagtgttcagcgggctgtaatcaggcaccgagaaattggcaccatcaatcaaggcaggaatggggtaagtgccttgagggatccaaggagcataggctttgtagtacagatcaatatctgacttggcaaagtagtcaccctgctcgtagagaccaagcgagttgcccttctttgccttggtggcatttggaatcttgtacaaggccttgatgcaggccggagtcatgttggttccgcatgtctggagatccgcaggaagtgacttcgccttctcggggataaccgtgttgatagagtcatcaattcccacgggcgtgcccttggaatgaaccaaatgcgacgctcgcttctccttagtggtcttcttgacgatggggctgagcttgacacccggagtaatatagtcaatgtgtgcctggatatgttcagggacgtggtacctaacactgttaaaagagtccaagatggtcagaagcagcaaaactcactcctcacagccaatcttgatgctggaactgctggcatgctcatgttcatagaactcagccttgaacagatcctccacttcatgcgcataggcatcaaaagccaaccatcccttgttatcggagtgtacaatccgggactcatgaatcccagaagcttcaagccagtgacgaacagattccacagaatcctttgaaggagcaaacaaatcatgaacttcctccgcagtccaatactgtccatatttgggggagctggggtcagaactatacaaatattagtgattaggatgtacaccatgaggacaagacacataaaacaacttacacagccatgagatacccatcacccttctccaaattattctgggtaagaccaatgcgcacaggcagcacagaatcacgcttaatgcgctcgcccttcacccaatccaaatgctcgcttcgcttctcatgcaagacatgcttcaccggtgctgggacggctccagaaagagccgcgatcgccagagcgacacaaacttggcgtacgagcatcttgaggaacaatggagctgtggtgatactcggctatctgggatggggagtttccccctgatatatagtacacacgggacagctaatcgcaatgttgtgattgcaaccctaatttccggactgcgatggcgaaaaaagcactaattaagattggcagatctgattggatatatcctctagtagctgcatgaagtttgagacaaaatccggaattcaaccggcactagagatcaatgcccctggcataacgacttcgatatctctgcgcgggatagcttaagagcgcaggtggtaatttatagctcttattctgccaatttctgatattattacttggtatttcttggtagtttcttggtgattccttagttattgcttggtcattgcttggtgtttttgtcttatctcaagaggggtgctaggctagttcgatgagaacggacgctacagcggagttccgacggagaaatccatcgatgtagcaacgattcatttggggctgaacctggcgagaagtcagagatccaatgggagaatatgtaaagtcgttcagaatttaggattcttcgtgaaaaagaaaacaacctcgattccgggcgtcaaaccatgcgacacgggccggggtcttagagtcgaaggaacttctcaggagttattgtaactgactactatgtgccatctgtattcaaaatatgtgtataaatttatctaaatcaaaaggaaaaacctgacatcatcatcatatcgaatatcaatcacagtggagaccacaagacggcgtctttttttttacgaggagaaaaaggaaaggggaatagagggggaaagacactagaaaaatctagtggtggaagagacggatgccctgctcgacgaaggtgatgcccagcttctcggcagtctcgaagacaggggtgtcgttctggctaccagtgggggcggcgatgtacttgacccctgagcgggcggcacggaagacattgtcgatgaaggggaactagtgatgacaattagcatttacgaaagagtgtgggcggacaaggggattacgtacgaaggcatcggacgagacagcgacctcgctgagcttctggagccaagcctcacgctcctcctgggtgaagggagcggggacttcctcgaagacacgctcgtactcggcggtctcggcctcggtgcggggggtctggcccgagcagagcaggtcaatggcgttggacttgtcagcacgcttggtgccctgcttccacttgataccgatgacgcgctcgtggaagcgcatccaccagttgtcggccttgtcgccggccagacgggtgcagtggatacggctctgctggccagcgcccaggccgatgatctggccgttcagggcgtagcagacggagttggactgggtgtacttgagggcaatggtggcgacggtcaagtcacggagagcagcctcggggagggaggtggtggtcttgggggtgatgatggtgttgaaggtcttgctgggggagatgacgacgtcgttgcgctgctgggtcaggtggacaccgtaaatagtgcgggtctcctcaggtgccggggtgtagtcctcgtccatctggaggacgaggtacttgccgcccttcttcttggagaggatggccagagcctcgggctggtagccgggagcgatgacaccgtcagacacctcacgcgagatgatcctggcggtagggacatcgacgatgtcactgagggcgagaaggtcaccgaagctggacatgcggtcggcaccacgggcacgagcgtaagcctgagccagaccggaggtctcgatatcctggatatcgtccaccatgtagaccttgcgctccttctcgttcaggggcacgccgatagcggcaccagcgggggaaacgtgcttgaagctggcagcggcggggaagccaagagcttgcttgagctccttaaccaaaggccaggcgttcagggcatcgagcaggttaacgtagccaggagctccattgaggaccttgaaaggtagctggccctgaaccatgtaggcagaggcgggcttctgatgggggttgataccgtagcgcagcgacagctgctgcgcaccgttgccagcatactccttgcggaaaaagcctgagatagcggtgtcataatcggcagtctgctcgaacgccttgagggcgtactgcttgcggctagcctcggtgatagcgccggcctcgagctccttgaggaaatcggagtagtcgagggggtctgacaggatggtcacacgcttgtggttcttggccgcagcgcggagcagagtcacaccaccaatatcaatttcctccacggcctcgtcgatggtgacgttgaccttggcgacggtctccttgaaggggtacaggttgcaaacgacgtagtcgaccttggagatcttctgctcggcgagatccttctcgtcggactcgatgtcacgggcgaggataccaccgtgcacagcggggtggagggtcttgacacggccgccgagcatctcgggggccttggtgatggcagagacatccctgggatcaatcgttagttcctgggctgggtattgatcctaacgcttcttcttatatttcgttgcgtcatcgatgacagaggcaactcactcgacagggaatccagcctcacggatcatcttagcggtaccgccagacgcgagaagacggacttcctgcttgaccagacccttggccaggtcaagcagaccagtcttgtcatagacggagatgatagctgttcaatcacaaaatcagaatattagaattgaccatgaactgcttggaataaataaatcatagtccggggaactatgaagccaagagtgacataccggtcttttgttgagacatgatggatcctacggtcgacactagatatgttagataaggaattcccaaatgcagcccgcaattgaagcaattgattgatatgaagactccaatgacatacctgaaaccaagcgaagagggtataacaaatgacgaacagaaagaaaagaagaaaatatgactcgcggggtcggaccgattgcggcggcggggcttgatagcaaaagttatattacgtgatcaaccacagcccactgtggcgcgacccaatcagagatcagtattatgtaggagaccttagcggcacacgtgacctgggaatacataagagatttctcagatgcgccatcttctccttctctttttcttcttcatgaacaacgcaaaactcacattctactcaaaaagcgttcctacgaagactcgtctgatgaagtacggaaatcgtatagagaatggagaccaagtgccaactggcgaaggtatcgatcttgggtgcagtgcctgcttgacctcggtcatgtagtagggattgcaatgattgattctacataccaatcggaaataataaatataattgatattctttttgaaaacctcgcttcttataatctttgtaggtttcatcagagttctttgatatacggagtaaagtagtcttctgcgtagcaaaaattcggcgtagccgagttctattacaattctttatcagagccatgaattatttcgaatgtacattaaacgttccctatccttcatgaggccgttcccagcaaagctcgagtcctcaatcatgaaccaggaaaactcgggcgtttttgagcctcacgacttcataacgtttttgacgcgagctccgatggcaagctgacggccaacatttccaaagcacacgcacgcgcagaaaatgacactggcaatccaagtgccgaccgcgaagctctcctgtgtgcaaccgaaatctggacccagcacatgctctagtcctgttccattcagaatgctggtgcggaatgggccggtcgacgcaggcacaagctctggcttaaggccaaggaccacccccatgccggccaagccaacggtggttgagaggacgaagccggtcgtggtgcggtcaatcaggtaccagagaacgggattcacgagcgcgagggttagcgatgcttgtgtggtagattcccaagggagtctccgctgtaaagaaaaaagagaagtcagccttgtcatatagcaatggagcaaaaaagaaagaatccacttaccatggcaaatgcaattccaacaaacgctccaacactgcgagcaacagcaacccaagccggggtgcgatccccactttcgtcctcatcggtactcgcaagctcggaatcagactcgacctcaccatccagccaaggaagcaggttaccgagaacaacaccagccaacccccaggagaccaagtattgcgacaagtcgtagtaatgaatattctccagcttgacaggcgtaatccaatggttatcatgaagataaacagtgatcacaccgtaagcaagaccaaagccaaagagcagcacgctgctcagtgcctgcggcaagatcacgccccggaacattccatggctcagacgagaccgagtcctccgcagcgacatctgccgcggttcaatggccgatttctctgcttcgcgctgcgactgctcgggcgggaactctgactccggactgttggcttccgtgccccaggggctagactcgtcgcggtccgccccgtcaaatgctgtcggggagtagatcccgtacagcgtcgaggaggtcaggttcatcactgatcctgtgcggctcacgctcgttgagttggacgcggcttctgcttgcgggttcaggtactctggctcgatcggtgttgggggaccggacgactccgtggaagcgggcgtcagatcgaatggtcgtctcgggcgcggacgcaggatgcgagggtgttcgttcatgatggctaaatgtatttgtgtgttgatttcaaagctccttaaattttccggggaccagatgatcgccggcgcgacaaaaaaaacttgtgttttatttgtcccacacgtttagatgatccaagctctgtaagtcgagctgtaatagatggcacaagatgatctgtgactgggaatgtgttaagcgaaatgtcaaagtatggggaaaggagaaaatcgaaaatggagactgggggagcttagcgggacatgacgcttaccggaaatataaacttcctcgaagcaacaagggtcagcttgctatttatctcagggttctgggatttccgaggttaaatgaggtcggttcaggttggggagaagaggaaaagtgtaagcgtaaaggatctcaacaaattatgtacccttaggaatccgcctcgtattgttggccgcaccgctctgtagcaattcgtatccactcggacaccggactcccgttactcgtatgatctgctgaaatttctctgggatttctatagaagtggacagatgtacggagcatgaaaaggggagaaagaggggaattatcacatgcaatgcacgtcggatgtcaaggtagtactcgccacttatgtcaagggcttgggtggaagtgacttgaaatacaaccattccggaagagaatggtacgcctagaacataggagaaagacaaaagaaagagtagatcgtgatacacaagatttcaaaaacaaaacgccaacccattagtcttccatcgcgtcgtctccataacctcccccgcgtgggctaggtagaccccgaggggctggggacgaggcttcatgtcgtccgtaaccattggcgccttcataggcggaggaattttcatcaccgtccacgtcatcttcgtcatcctgatcgtcagagaagtccccttcctcgtccgctcgtagaggggcacctccatcatcttcgtcgccagaaacttcgccaaggagttcgcggtcgagatcatccagttctccctccataaagtcatcgggtccgtgctcagggtcccaggttggggtacccatagccgatggccctgcgcccaaagcatcgggatggccgtgagtgcccttggcctgtaacgctgcgggtttcttgatagtgccggggttgttcgttacacccgtagacttgcgcttggaagcactagggcgaggacgcgggcgggatcggttgttggaacttcgcacatcagcttcgagagccgccttggcctggtatcgctcctcgcgctccatcttgcggtctttcttgggaccattggcttcggtgtaatcccagcgatcgagtcggcgggctgcttttcgcactacagagagaaagacgctcgcacattctccaaagtcatcttcttcttccgggttcgggaagaggccacccttgccccacgaggtttcttcgtcatctgtatcgtagccctcgggcagaccctgaagcaagcgaccgtagcgcgcgaaaggaatctcactctcccgtttagcacggagaacgcggtatgcatttgatttacgtttagccagcagatagtcaatcctctgccgacgattttgctcaacggctatctggtgctgtgtaagtggccgcatccgacgcatagtaggtgccgatgaaagcgaaggctcagtaataaagcggttaagaactggatggttggggcctggaggagcgggggaagcatcgggagtatgttccatcctcgttttcaagatgagtcgctgttggcccacggctcgattaagtgatgattcccgcttggcctgtttaggtcgcggacgggagtgaccgggggtcatatcatcgtcctcatcatctaagctgcgtttagcagaagggtgtagaggggtggacatagcagagccacgacctcccataccagagtagtctcctgcgaatgattcttcgtcaatgccgaattctgcggttagaaaaggttagcgttctgtagacatgtacaatatgatagctctccagaattcccaactcacctttcttgggtcgcttgggaatgcgcggtagtggttcctcttcttccaggatgcctgcgcaaaatgtcagtgtcccattttcaacagtcagacctaggcacacgtacgtttgcgctctaatcttttggactccccgtattcctgttcctcgggtgtatctaaattctcttcgctggcttgttcctctgtcaagatatcaaaggcaggtactttcaaaggaaggccctctgcaccctcgccttccacacctggaccaaacggattgttcaaggcagcctcgcgactgaaatcgctctcgagataccaccacatcagccagaggaacgccctagcgcgactttggctgctaagtgtagacctcatgactaggtcgaagaagtctcgcggaggaaagaagtgtgtttctgacactttgggggcatactgcgccagaacaaaaatcaagttcacggggttggtccgaggtatattctgccgcttaatcttttcgagggtattcggctggtccacatcctctgaagcgcccttcagaatagacttcagacgaggagcatcctgcagctgcttgtaggcgttggaatcctgatgcgcttgtagtgaggggatcgagtggtaggttcggagttgagcacgcatttcggggaagactagaaatcgcgacgatagtgattagcacagaggtcaagtatattatggcatagctgcaagcgtacagttcagggtagtgttcatgcgaccgaaattgaccagcagacaaaccatagccatattgatagccgccggtttgtcgttctgcagtttatccttcagaatcttgctggtcttgctgctccgagccatcgcattgatgtaaacatccgcgaagtccattcccttctgtccgtcgggataccgcgtaaaaacaggcgttttgtcctcaaagaccagcttcaggaattggtactggatatctttgcgccatagaggtatgccgtcgtctttcttcaggtgtcgaatcttattgccagagtagacagagccaattgtgccattcgcttgccgccttgtaccgaccgttgcgctcgcggtcatgccgtgagactggtcatccgcagcctcggacatcgcgaaggactcgtccatcatactgttttcgaagtcggtcatcttgggtttattggaaccgctagcaggtccgcgatcaggattctaggagaatcgcaagttgtaatgtgaagtgccccctaggaggcggccgatgaaagaggcagaagtagtgtaagaggaacgaaacgaaaaaggaaaggataaaagtgaaaaggagtgccaagtaaaaccgggaaaagggaaaatgaagttcaaaagccggaaaaagaggaagaaagcagagccgagtggcccatgaaggtatagctggtgtgatatctacccgtatcagacctcgcgcgtttaatatggcgcttaatgccacgcatttggatttccaatcgacggaggaagcagcgcaatagcaactaccatttatgatgtgtgttatttacatgcatattagtcctacggaaatcccactttacaacctagagaagaattggaaacacttttcgaaattgcattggataagagaactttccttctcatggccatctcagggccgttggttcgcttgttcactcctaattcgaacccgagaattcataagtatgcccattcttccagtggcgacagcgccctatcccccgaggtccgagaaaaatgatcaaaatagacaaggaaatgaagcaagatgctctcattcggagataatcagcctccacggacccgaaagcagaggacatgcagttgcaggtcaagccaacgccatacagaatgcaaagaataccttttttggcttcgaaacacaccagccgcgccagggggtgtaacggcgagataaccagtatccgaaaaaaagcgcggagaaagaaagcgcacgtttttgttttcgaaaaaaaaaaactcgactgcagaacgcacgagggcagcaacagaaacaaatgtccgccatgagataccgacgctgtaaaaagtctatgctgcatatgatgaatgcagccataacaacaccgaagatgaatgcgaagagaaaaagaaaacttttcgagatgatgaaaagtcatcaatctccgctcggcgcacgcgcgtcactcgaacgtatccccagtggggatgctcgaacataaggggtatctgacgagagcggacataggaaaaaaaagacaacgcattctatgatgttcatgcagtttcgatcacgggttgccccaagagagtagtggtgtctcccaggagcaaaaaaagaagatcggactgcgcgaatgcctcgtatccattacaaggcaatatttgaaaagccatgaatagaatcagcgaagagacatgagaggaacagcaaaggaaacgagattaaagcatacgcaaacgggaaaatatgaatctaaaacaagcataggaaagtcgtgcagtcatgacaaagcccgtccctgagagatagcacaggtagaagagaactcagggactcaatctgatcgtatccgtcaacgagagacaaaagaaaataaagcaagggagccaatcagacccgagggcatcgtcaaaagaccacgactgatttaccaccaggaagatgggccggaggagccggaggggttgccgtagctaccaccacctccaccgtagccagcaccaccaccgctgccgccgtaggcgggagcagcagcaccgccatagccgctaccgtaggagggggcagcaccaccagagccaccatagccaccgccaccgccgaagccaccacccatgccgccagggatacgacgcacatcacgagtagcagtagcaccacggccacggccaccaccaccacggccacgaccgctgaatccgctaccttcgcgggcaatgctctccaggaaagcgggaacctcctggtgggcctccttgagaagctcgagcaagtcacggacaacaccacggttgccacggttgaagaaagcagtggcgataccggtgttaccggcacgaccagtacgaccgatgcggtgaacgtagtcatcaatgtcagtggggagatcgtagttgatgacgtgggtgacgtttggaatatcgagaccacgagcagcaacggcagtagcaaccagaatagggcagcgaccgttacggaagagctccagagcacgctcacgctcgcgctgggtgcggtcaccgtgaatggcggtcgcagggaagcgctggttaatcaggaaatcagagagcgagtcggccatgcgcttggtttcaacgaagatgagggtcaaaccagtgctgccgtgagtgtgaagaatatcgagcaggacggagcgcttgtcagcatcctcgacatactcgaccttttgagtgatgttctccgaagtacttccgacacgaccaacggacaagaaaatgtagtccttgaggaaatcgcgagcaagcatttggatatcgcgggggaaggtggccgagaacatgagtgtctggcgatcgtcgacaccgggcatatcctcaccctcgacgatacggcgaatctggggctcgaaacccatgtccagcatgcgatcagcctcgtcaagaacgagatacttgatgttagccagggagatacgtccacgctcaatcaaatcaaccagacgaccgggggtagcaacgagaagatcgcaaccacgctcgatctgacgaagctgagagccgatgtctgcaccaccgtacacgacgcaggggcgaacccatgagcggtaggcgaacttgcgggcctcctcgaagatctgagagaccagctcacgagtgggagcaaggatgagggaggtggggtaagccttacgctggcggccgtagctgaattgaccaccaccgccaccctgggtaggggcagcagaaggaccgttctggaaagcttgagagaggatagggaaaaggaatccaccagtctttccggaaccagtctgggcacaagccataagatcacgtccgttcatgacgatggggaccgagtacttctgaacgggagtaggaatgacatagctggcaagcttgatgttggcaatcaggtggtcgtccaggggagggttagtgaactgggtaacaggctctgggacatcgtttccggaggcctcaacggggatatcatcgtagttggagaaattgattccagtctgctgcttagtggggtcgtttggcactccgaacagctcgcgctccaggcgagcattggcaggaccgggaacgtgcttgccgtcgcgccactggccatcgcctgagccaccacgggattgctgagaaccaccaccaccgctgtagccgccgctgctgccaccaccgctagcaccaccataagaggatcctgggtttccgtaagcattgggattgaagggccggagttttccatcgggagtccagctggtcataccgttcgcggggccacgagggctgaagttgggagcgctagcattagcccagttggcaccggcgtcactataaaatacaaaaatcagttgccgattcatgatagtcagtcattttggtactgtaccgaggaccaccgaagccaggtccagaaggagcagcctcagcattagcactgggggcgggagcgggaccagaaccgggaccacgctggcgaaggtgaggaggaatgtaggcagcacggccaacaggggcgttaccctggggggcgtgctgagattcgttgagggaaaggtttcccatttgcaaaccgtcggccatttttgcggttgaaagtgtctattggaaagcaagagttagaagatgtccgatgtcgacggtgaacgatgttgcgtacaggtttttgcttcaccggaaaatattggtcgtagataaagcgcaagtgatctggaaaagatacttgcaaagaaaaacaaatccacgtaaagtgtacctttagagagagagtgtgtgaaaagatcaaatcgcttttctgttttaactcgataagaaaaaaaaaaaagatcgagtggcaacaagaaagctcaggaaaaccacagagaatatggaaaatgcaaatctccggaatctaagaactctagagagaagagaaagagagagagagagagtagtgagaaaagggatgatggaggggggttgaatcaagagagaaagagaacggatgaagtctgtgggaaggaggcaacaaaagttggagacttggggcgtgtgtggctgttggaggtacctgaatggaacctatctgtctgctatatttacctgcttactagaagtaccggttaggtacctaccgccactgaagaaatttctactcgccagttgctgcacgtaggcggtctggacacccttgcctgactaagataggaggcgaaccttacgatctgagtggatgattttcccgcagtcccccaaagtatatcaccacctacatacgtgaggtcacatccatgggtgatctatgatgagggtcatcgggcattaaaatccaggggtttagggggacagaaggtccaaaaataatgtctcattgatctaatatcatttcttaggcatcatactgtttctctttctcttgctcttgctgctggcctcgccgacgggcaatccagatacccacagcggctaccagaacgaagaaaatcacgaccagctgcagtaagtaagatggcgtggcctcgggagcatcgggagcattttcggtgacacttggctcttggtcgagttcttaaagttctccaacatcatcagccacttccaactagcagcagaaagtagacagtcacctgtctagagctcatcgcggctacctttttcctcggtctcgggctcaagctcgagctcgccgctcttcacaatcttgaccgctagcttgggcctgtcgccggatcccttgggaacgttttggatcttgtcgacaacctcatagccctcaaggacctcgccgaagacgacatggcggccatcgagccaactgcgttgtttccgttagttattgccccaaaggaatcactgcaagggatacgaacgaggtgatagcggtggtgatgaagaattgagagccgttagtgtccttgccggcgttggccatgcctaagaatggtcagatgtctgtaagattgaatcaaatgagtggaaatgcctactcagctggcccttcttggtgtgacgcagcttgaagttctcatccttgaacttgttgccgtagatcgactttccgccggtgcctgtacacacttagaataatgcaatcaacttgctcggaggctcacaaaccatcgcccttggtgaagtcaccaccctggatcatgaagtctttgataacacggtggaaggtagagtcctggtagccaaagcccttctcgccagtagccaaagcgctagacatgggttagcatatgcaggataaacgttgcagacattgacatagcaatgcaccataccggaagttctcagcggtctatacaaataataatgtcagcaataattatcaattagttactgagagtatagttctacagacctcagggacggtcttgccgtacaagcccatcacaatgcgaccgaggggttcgtctccatgctgaatgtcaaagtagacctgtcaccaacaatcagtaccgcttgcatatagaccgagtcggaatatcaatgtcaatcaccttgctggtaatcttagggccgcgaggctccttggcctcttgggcttgaaccagggcaaagccaacggcgaagacaaagaacagggaaacgagaagattccggaaatacatgattgttaattgccactgctctggtaggatacagcgagacgggaagatagagtaattgggagcggaagaaggccagcttgcaatgcggagaatagacggggtagtgccatggaattcaggcaccaagttacggaaaaacgttgacggaggatttctcccggagttcaacgagagcaacaagtgacggctccatacgattgtcaggacatcaaccagccagcacagttcaagatggtatgttagccaccgtcaagatacaatagttcctccaaagaaacctgctaatagcctttaggtcttcatccttggtgtcaatttccccgagcggaatctgctcaaggcaagccaacccgcacgattgcgcccatagcctggatatcccaactaacatacattgagcgcaatagaaatccctcgagaccttcttcggaatcggcagcaacggctccggtcgcctcatgtcccgcttcaacatccatccgacctgccgcgtcggcgagctggccaacaagcaggtcctcgacctcacagccgtgctatccgaaatgaaaattgagaatgatctgcgcagagaagttctcaatgatatcaagcgcatgaaagagaccggaacttaccgcggccgacgtcatgcgctgggcttgcctgtgaggggacagcggacacgaactcaggtgggtttccccttcctcctcgtgctctattgatatctcatattgcacctgagagacctatgcgagcttatggttaactaaatcttaatagatcaaaactcctgtcaagttgaaccgcatggagcggagactataaacttgatagtgtcgtgttcgattgttacttttatgggatcgtctcactgtttttcgtgagaggcatggatttggcgttgtattgatttctggcactcgacctttgccagtttatatgtgaacggaacccctctgtggatgtattataggctaggcataaacctggggtgaatggaagcttcaaaacagaactatatatatgtacggtaaagtcgtagtgaatatcaggctgtagtctgacatatatccaattccgagctaaagatgtacgcaaagatgggaaagtaaggagaaaaaaaacatgtaagtctaaacttttgccctcaaccaagtgttaaaacgccaggcccatatgtgcactcatgccttcgaaggcagtacgccttcgccgcggttgatttggatccgcttatcctctcccgcgctgacaatgcccaccgtcttgtcccagcacacgctgaacaccttgacaccttcaccgccaacccgcttgctatcggacttaccttcctcctcgaggctcttgcgagtaattgagtaaacgctctcaccaacaacaccttccttgtcggtcttggtagaccggatatcccaaattctgcacgtgccgtcgtggctaccgctaatgagtccatatgtgctgtgagggtcacgggccaagctgacaacagcgttggtgtgacctcggagggtcatggcagccacagtagtagcagaggcacgtgggtcaatcagagtgatatggcgggcggcagtaccggcagccaagaggctgagttcggggaggtgctcgagcgagaggagcgagtgtgatgtggtgcgagtgtcaaccagagaaccagtgaccaaatcccatgtccgcagggagtgatcccatgaggccgagtaaccaacggtagcatctcttccatcgaaaatagcagcagaaacaggtgccgtgtgggctgacagaagagtcagaggaccacgctgcggtgtgctaacggaggtgttcagcttgcggcgctttgtgttccgagcattgctagaaggaagcaagttctcaggtgctgccggagcatcagtcttcttagttgaccagaatccaacggtgctatctgcggaaccagtcaatagacggttggacttggcatgaactgctagtgactcgattccagccttgtgaccatacagctccagctgaggagaaatttttccagtgaaaccaccttcaccctcagtatacttccacaatcggaccgtgcgatcaagacctgcggatgcgatctggtttggagaaacgaacttggcggttctgatagaggcggtgtggccaccatcggcggcggcaggagaggtcgcgatagtctcagacgacatattccagatgcgaagcagaccatcatagcttcctgatagaattctttcttggcccttagtaaaagtcgcacctgaggcccaggatgcagcatgtgaggtcgtggaaaggacgtctgtcgcgctaacccagtcatcatgctggaacgaggcgatatgcaggggcgggatcagagctcgaacatattcaatctcgagggtcgtctcagctgagataccgttgtcgaccaaatattcatcgatcgaggtccgcaaaaaagttccattgatcaaaaactcaaatggaatgggcttttcgcttgagagaaggttgttcacaagtgtcgatagcgcatatcgtcgaagccctttttaaaggaagagtcagtatttgatactactatttatgatttctgatcggcaatgggtctcacctgtaggaacaagaattggaccggtgctttcaggcagagcaatatcctcctgctggctaatgagctgcacacggacttgtctctgtgctgactctgcagtgactagatcttcgctcattgtgaaatcgttcaaattgctgccggtgttgcacttttttggtggctgtcgcattttcggcgggtgaggaaaaaatacggcgacccgtgcggcacacttgcgcagagcgcggagatggccccactcggtctacacagcttattgtaatacactgcagttttaacatatatctggtgaatgaagtgatatttctattacgtggatggggcttatcctctaggcgctcttcgaatctctgcaatagcacgtcgccggtgatcagactctgcgaacaaggcctcgatcaggtcaatcacttcgtcagcagagaactctaagcccaactctccttcgagccaaaggaatttgatatcggcgagggagctctctagaatattgatcatatattggaaacgcagccagcttgaaacgtagatggcagtgacgggtattgcctcggcatcaccatctgtctcgcgcatgaacaggtcctccaattttgagagttggttacagaaggagaccagttgccgtgactgatcctccgagatatcacccaaatcttcgatatcgatgaccaccttgttgatcacagtagataagagagatccaactgattggagcagcgcggaatgagacagtatgggttgccattccttgtaaacgtcgcgaattcggtcgacggttgcgctaacagaattctcacagtctgcctggaatggctgctcggagcattgtccaaatccttgggctccgtcaagcagatctgtgacgatagtgcgttgcgtctgcatctctttgctatacgcaagtttgccgaatttctccaaagcttcaacgtcgggctggagtttggagagtgcatgttcttcgactagtttccggatctcatcggcaaggtacagactatcattataaaggtacatctgccctgaagtgagtttcagcgagtagaatgtggatgatgtagctttgaacatagccaggatcaaggttggcaatgcaagaagaccagcaccagaagaagcgacgcgggaattggcgtagctgggctctagttagtttgcaaaggaaacaagttggaagacggcatgacttacgcaggctgcgaaatatccttcgaatcggtgatttgctgctgaacgaccttaagaacagactctgggacatcggtgattgtgaagacttccttcagggtaacttcctttggtgatacaaattgagttgtattcttcgtgtcggttgcgtttgtcgatgatgttttctggggctccgaaggcttattatcaactttatggtcatcttcatcctcatccccccagccccaggcatcatcgtcatcatcttccgcagaagcagctgcttctggtttggcatcgggagtctcctcgacgtcctcgtcatctagaccccacgcactaacatcttcctcttcttcatcaggctttgctgtttctgctttcttgggctcatcttctttatcgtcatcccagtgggcgtcccagtcctcattgccggcattctccaataaagcaccttcagcttgtgaaacctttcctctttcaattcgttcgacctgtttcgttgttccctgactggcggcaaggactttgcggacgctatcgagcgagtcgactctacgccgagtcaaccacaggcgtggagcttggttgacccacgagacgagttcttcttggccagtccaaccccacgactctatctgctgggtgaactgtgaaacatgactcaggatattctcaaactcggcgaggccacctagatcggtgggaatagcaggggacagccactcgcagattgcctttgaggaaataatcgcaatgaatgattcggagaaagtcgcggacaccgatgacggtagattttgtcgcaagtagcccaaaacgctggaaaggcgatccaaggtctccagtgcggtcgcctttgaggcctcaggctcaatgcgaatgctagtctccgtcaccaccacaccatggctagttccattagggtgaggtagcaagatcggatttacgatcgccgaaaagaggtccctttgcagtttctcgatggaggatgtgagtatatctagtcgggccagcgacgtaatagtgctctcaatagaaccggcatctgcatctccgctagagacatggaattcgccttgttgtcggtcaactttcaattgatcagcccagcgcgaaagaagggcctcaacaatctccgatcgtaacagtgacacctcatcggagagtatacccatcacatttgtattcgtaaagaaggcatcctttccaacagctgcgtcggtagactccaattgttcaatggcggtggtgatctggccacttctgagagcagctcgccctgtttccagctgctggcacaagcggtgcacctcctctagggtatccgctacggcctgattgaaggcaatctccgtctcaaccaaggtgactttcgctctcgcatcttcaaccttcgcctgcaggggttcggtatgctcatgctgcgcgactatttctcgcgcagttaatcttgagcgttctatgtcggcgtgaagttgtttcgcttggataatccagtcgtcggcatcgaaggtgttctcgcgactcaaggagctaatctcattctaatcaaagcagcgctggtcagtaatgaatgcccgacgtgcgtagatagccattgggggcttcgtacctctacctgctcacgtgccttcgatataagctcgagctccctggcgagagcagctgccgggaagttaccagcaactacactctcctcgggataggtcccttcggtgacaaagcccagcaccgcctggcacaactcctcggtatttcctgccatgataccaacttttccaaaaccaaggacagattgtcagggaacacgagcttcggagcttcggagacagatgtgcatgtaaagaggagttgagctgtcaacaacccgtgacttcgaatttgggcgtcaccgccccccacgtggtgtatacgctgtatgctttcgctctagatcgctaaattcgctagaattttaattaaaaatatatctcgtttgtatttgaatggtcgcaaagaatccaaaatctattagccctctctctttgttatataaattctttcagttgcccgctttgtaaggaaaaccggagactgagctctctcccaaacttggaaaactccgggaccaacacaacttttgaagacatctcagattcaccgtgtctcggatactccccctgagtcgaagtacttgttttctgtaagtcaatgtgaattgcgttctcagatcttattgcctacggaggggcatcaagtgtatcaaccttctatccccaatttctgcttgtcaccccgcctatgtcattgtccttgacaatatgttgcacctttcaagatatgatttagaaaggacctcgccaattgctgcttttgttcccattctattcaaacgcgactcggggtggatattcttctctcatccgagttgtggtggtcatacttgttctcggacaattccttaccgcacgtgcttatgtgctcacgactgtatcaaatgtttaataaagtgacacgaattgctaactaatcaacaagactgtcaaccctacggcgaaatatcttcactgggtctgtcccattgatcaatatgtcgccctcggtgcagaacagtcacttcaaactgctccagcagttcaagcctgactactcggcgagcgagttcactcagtatgaatcacagcgtaccggcatgagagtggtcgttatcgaccagccgggtcccaaagtgaacggttactttgtgctcgctaccgaaatccacgatgattcgggtgctcctcatactctggagcacttgtgcttcatgggttcccgcaattaccgctacaagggcttcctggacaagctagctacccgcgtgtactccagcactaatgcctggacggcaaccgatcacactgcctacactctggataccgcaggctgggaaggctttgctcgtatcctgccagtgtacctggagcatgtcattgctcctaccctgactgacgaaggctgctacactgaagttcaccacatcgatggctctggaaatgatgccggtgtcgtgtattccgagatgcagggtgtacagaacaatgcggctgagctgatcgatcttgcagcccggcgattgacctacccgcctggtgtgggcttccgctatgagacaggaggtatgatggaacagcttcgtgtcttgcctgcggaacggattcgcgagttccaccgtgagatgtatcagcccaagaacctgtgcctgatcctcactggagaagtcgaccagagcaacatgctggagatcttggataagttcgaagacactatcttggatgtcattcctagcccagaggcaccattcaaaagaccctgggtggattccaaacaggctccctacttggagaagtccgctatccagaaagttgaattcccagaggaggatgaatcatttggtgaaatcgaaattcgattcatgggaccggactgcactgatactatcttatgtaagatacaaaaccccaagattcgatatcaaatacttacagtatcatagccggcgctcttaatgtgtcacttttgtacctagccggttcatctgcagctctgctagagaacatccttgttgagaaagaacagctcgccagtgccgtctactattcaactgaggaccaccctagcatggaggttcgtttcacgttgaccagcgtggaaacagagaagttggagagcgtcgagaagagattctttgagatcctccaagatgcgatgaccaaggaattagatctgaagtacttgaaagagtgtatcgcccgacagcgccgaacctggaagttctcgactgagtcttctgcctcttcattcgcagagtacgttatctctgatttcctgtacggaaagcgcgatggctcgaccttgatggatgtcgcaactctgaaggaatatgatgtccttgaaacctggtacgaggaccagtggcgcgctttcatcaagaaatggatctcagatgctccccatgtcactatcttgggtatcccgtcccagaagatgtccgccacgcttaaaaaagacgaggaggaccgggccgctgcgcaaaaggagcgtctcggcgagaagggcctgaaggagcttgccgataaactcgataaagccaaagcagagaacgacaaggagattccgcaggagttgctggaaaagttcgccatccccggaactgagtcaatccacttcatggagaccagtacggctcgttcgggtgctgccctgaaatctggacggcccgacaacaagatacagccatttgttgatgccgacaagtctgaccagtcacttttcattcacttcgagcacatccctagtagctttgtccagctttcagttctcatctcagctgattctgtgcccgttcagttgcgtccattgctgtccatctataccgaggcgttcttcaacatcccggtggagcgtgatggcaagatcattgactttgagcaagtcgtagtagaattagagagagacaccgtcggatactcgatgacgactgctcgcggtcttgggaactcggagatgctccgtatctccttccaggtcgagctggagaagtatgcgaatgccgtcgcctggctgcaggagctgtgctggaagtccgtcttcgatgtggagagactccgggctatcaactctcgtctcttggccgatgtgccagactccaagcgcagtggtgactccatgcttgctgctgtaaatgtgatggttcactacgcagaggagtcgatcacccgggctcgttctactttggtgaaggctcgctaccttaagcgcgtcaagcgtctgctctttgagaagccggaggaagtcgtcagccgcatggaggagatccggaaatcgctcttccaacccgacaacgtgcgcatcattgtcattgctgacctcgagaaactccagaacccggtctcgacctggaagcccttcgccgatgccctgggcaccagcgctgagttgcggcctatcactgaccggcgatcccagctgagcgatgccggcaagaacattggcggcaagtcttacattgtccccatgccgactattgactcgtccttcgcctacgccaccgcccgtggtctgacctcgtacgattcccccgacctgcccgcactattagtcgcgatttcgtacatgaacgctgtcgagggtccgctctgggttgcagttcgtggcactggtctggcgtacggcactaatttcagttacaacatcgacaccggctttgtcaacttcgatgtgtaccggtccccgannnnnnnnnnnnnnnnnnnnnnnnnnnnnnnnnnnnnnnnnnnnnnnnnnnnnnnnnnnnnnnnnnnnnnnnnnnnnnnnnnnnnnnnnnnnnnnnnnnnnnnnnnnnnnnnnnnnnnnnnnnnnnnnnnnnnnnnnnnnnnnnnnncttcgttgtgtcccggcccccgaacgcccacaaggcgttcgagtctagcaagaagattgttgatgactatctatccggtgctacgactttcgatcctttgatgctggagggtgctattagcagcatcgtggtcaactatgccaacgagcagatgaccgccgccaatgctgcccagggcagtttcatccgccaggtcgtgcgcaacttgcccagcgactataaggagaagatgctcaagaatgtgcgcgctatcaccatcgaccagatcaagggtgctctacgtgagatcatcttgccattgtttgatccgaagactgcaaacttggttgtcacctgcgcgactgtgttggaagaggtgagttgttcccggtctttacgatgtacgtatggattactaactttgattgcgaacagaccatcaatcagggcttcgaaagttccggctttactcccacagttcaggctcttaaggagtttgaggacgactatggtctgaaggttggtgacgaggaggaagatgaggatgatgacgaggatgaggactccgaaagcggatccgaggatagcgacgacgaaagcgaagacgagtgatatgttttatgaacgatatctacataggtagcgaggtagatcacataaagggaattgtggtgtcaaaagactctacatcacctcgacagtgatgaatctactctcttactcactgaaaacaggctgagactcagtaaacaccgagatctcaacttaaacaaacaaagctgaaataatcgcactatatgaaatgtagtcacacacttcctcagaagaggtaaatatggtacacgccaggcaagacccgccagcaaccgtcttgcctgaacccgaatccaatcttgaagactgcaatagttccaagaatagataaatcggtgaactgacctcttactttactcccatcgccgtgagaaggtacggatttcagtcaacccagcccaccccggcctctatgcccgtcatcgtccacagccccgaacgatttagaggtcagacccgaaacgaataaaactaccaactcaactccttccggcccttaagagtcctccgaataagagtcttacgtccattcctgtccttcttgcgcgccaggtatccatggcggcgcttttggacccgtcgcgacgggctgaacgtcacacggcgcacacctagggaggcacttgcggagaaagagcggcgctgcgagggtgtcttctgggagaggagtgatgacaggggtgagaaagcagttgcggttgcggttgtggttggcgaggagaggcggccgccgattgttcgcgagggttggaagcgggttggcgtggagaggagggaggagaaggagcgggatgagagcattgtggagggtgtgcttaattgttgcgggatttgggcgaatctgttgtcgggggagtagaggtattagctgtctggttggtttcgtggtggaaaggttgttggctgctgtacctagtcatcggggtccgcatggccgatgtggtggcctggaaggctgagggcacggccctggtgcggaggcagaacattttcaggtccctggctttgtttggagggcgattttgaggtggggtgggaacttcctgaagttggagatcgagtgaggcctgtggacaagacgcggcgtcggaagacagaaaattaagcgcggagccgcttacacggacccgcctagatatgcatggctacaatgatgtacggttgtacttaggttatacaaaggatagaattgggtaggtttagagtgtaatatctacaaccctataactataactacgcttgtttagctgtgaacaaatataacagtatacttgcagccgttaagaagacctacccgatcgggactagcgtcaccgaacttttttgatctcgagattcgaaatgctggacatcgctcgtgcaactctccgtcctactcgcaaatcacactgaactcaaggagaactctactctcagctctgtcactcccattaccgggttaaaccactctataaccaccgccaccaccactctttaacctcaaaaaacccatcaaacctacgaagaataaccaattccaccaaaatggcaacccaaggtcctcaggccctgcctccagtcacagtgcgaaacacacatgtcatcagccagtccgcagcgcatgaattcctagccgcctatctggaccgcgctgcgacagacccatcgttgcaacccaacgccagcatcagcgagcatggtcctgtctcacggacaaccaccgcagcgccgaacttgatcctgcacaacttgaagcgcgttcaaatgggcctagctggcgagttccttggtcgtgatctgactgtcgcgaagcagaaccccggggaggactatttggatgttgctgcgggtattccgcagaccaacggccatgatctgccggacgaaagcaatgatcttgtcatgaatgatgctgagtttggcatggaagctgaggctttcgcggatcaggaggccgggattgataaggaggaacgcaagcggaagaagaaggagagacggttggcggagaagaagggtaaggccaaggcgaaggctgaggaatccgattgagtgtggtgtgggtatatatatctgcttgtgggcgttgctgcattgggtcggagtcttttttcttttattcgttctattgctctattactctgggctggttgggttttggacgtacaaaagcactgctcgcatttcatgtctggaacaaaaagtgtcatttaagagtttagacggattgctacaatccaatcaatacataatagaacatttccaagcctcgcttttacttctcgagagttgagttccaccatgtcgacacaaaaaagtcgtgtccatgtcatataaaaatcgccagtataacacgcaccacgtttacagctcgcgatctgcggccttgacaggcttttcactgtcctcctccttgttgctagtgaccttgccacccttccagccaagcgcagcgagacgctcggtgaggatggggtgggagtagtggtagctagcataaatcggatcggcatccatagtgctcaagttctggatctggagcttcagtagcgaggaagcgagcttgtcagagtaaccgaggttctgggcgaatttatctgtggaacattgttagtaaaaccgagtgtaaaaccgagtgtaaatgtgatggatcgaatggaacataccggcctcaaattcgaattttcggctgagaatgttcatgagaagcttcacgacagcatccataggagccagggcgtcggagaagagcaggaaaccaatcatgataggctgttcgttgatgaatccgaaggactggtacaacgacttgttgttgacaaagacggagaagagagcgaaaatgtagaacatgtgggcctggattacatagttagtgataattcgccaaaagagcaactgaacaaattcgtacctgggcaatgccgaagagcttggtggtgtggctgaggctccagtggccaagctcatggccaagcacagcaacaacctcctccggctcggtcttctcaatcaaagtatcgtagatgacaatgtgcttcttccatggcagaccatagaagtaggcattgctgtgggcactgcgcttgctgccgtcaatgacatggagctcggagagagggaagttgagtctcttagccaagttctcgacaccggtcttgagttcgccgggctgaagaggcgagagcttgttgaacagaggcagaatcgcaatggggtagatagtaatggcgaagatctggaggaagacaccgaagagccagaggtagtagtagaaggaggtgtcaaacttctgaacaatcttaagaacggcagtgataataggagtacccagaacaattccgagcatctgccccttgagcatatccgtaatccagagcttgaccgtctgcttgttgaaaccgaacttctcctcaagcacaaacgtgttgtagtacgagatgggcagcaagaggatagtgcttataatgttgaaaccgaagaagaataccaatgtctgacaaatttcgccttggaaccgaccggggagataccgagccagcaccagaccgctgaggccccagatcttggggaggacatcgccgtagatgaaagcaaggttttggacttgaccgtaaagaccagagatgaagccgaacttggcctttgcgcgaccgtatgcctgtagtgatgtttcagtaagcctctgtatatgatataattccccgtcatcgggttcatacctgactctggtcaaagaccttctgggtaacctccccttcgaggacctggggaggctttgtccgttgcaaaaacttgtactgccgaagtgacaggaaaccctcaaggacgaactggcccactgaaaatcccacaagcacgttcttccatgggaagagcgggcgatcgagcaaacgcgccaattgctggaggacagttattagcgacgtgtccacggtggaaagcatatttaccgtataaacatgatagtatcaatcaaatcaacttacctcgaggatatacatgatcgaaatcgcgcaactaggcgaagaaagaggacgttgttcaaggcagaagaagctagtttgttattatcggcagccttagtcagatctcatgcatgacccttccatggcccggggcctaacgcaacgtcgatctcaggaattgggcctattaattaagtaaagtcttgtttattttaggccaaatgtgtgagatgaggagttagtgggagttaattatatgctagtctgcctgcatttgaaaagtaaataactggcgctgatgcattgctgaaagtcttagtacaatactcgaagattgtagatgtcatctatactcaaaagggtagtatttctcgagtcgctctatatataaaagcagttggtggcttagcgcgtttgatcatccccgtgcgaggcaatacgagtggttatggtcgtgcaatatatacatccgacctgcagactatctagcatctaccacattgcaaatgtttatatcgattaaacatacagaagctctttgattatgccggccctaatttccctgcatttcagatcacagacctgtataggcctatctacataagatccgataatgcagacaaaaaatgagcaatgaacaggaaacctcttgggaacaactccctcgtacgatggaaataaaaagcacatatcttattcgccgactccacctgcatcccgttcgtcgtccgtccctcagatcaaacccgagcatccagtcgcggaccaaatcaagtggtcgctgacatgcatgaaggtaaaccgatcaaggtggcgacaatacatgcattgcgcatctcctccatcttctctattcagccgggggaatcagttaaatcacgtctttaattttccgactcgtcatgaccataaacttttttgcaatcatagatcgcaagactcgtgttcgagggttggtggggtgggatcgttatgcggagatatagcaagatttatgtgcaaatcaaattccccaacacaacagatctcattccccaaactccccattccgaactgggaaatcgttcaaaggactgctttactgctgcacaggctcaagggtgttaccactgcgaattgaaaaagtcagcatttgtcactagaaataaccccaaaccagtagacttacgcaacaatgttggcccatccgatcaaacgccagtgcttctcaattctgcgactgatggcgatcttctcgccaacttccgtgcaggcgggactggtcaagctgagcttagcggcatcagccttgacaccgaggaccttagcaccagtagcggtagaaccgatgttaaccatcaggacttcgttcttggcaagcttggcaaccttggcctgcttgccgtcggcggtcttgacacccagcaagcggcggagcaggaagtagttgacctcaatctcagtgtagatagcaggaaggcggccacggtgaccgagaacgaaaccgacaagacgatctgcacggcaaagcgtggggtcgacacgggtaccaacaccaatcaaaccaccaggaacggcaaacttgaggtcattgtgctcagcgaagagagacacaatgcgggagaaaatgggtcgacactggatcttgccctgctcatccttggtgacgagaccggggcggatctcaatctcatcgttcagctttacaacaccggtaaggatggaaccaccggcaacaccacccttgagctcatcaatctcggcaccgggcttgttgacatcgaaggaacgaatgatcatcatgtgaggcgtatcctggaagttgcggatggggataggaatcgtctggacaagtgcctcgttgacagcatcaatgttgtacttcagctgcgcggaaatggggataacgggcgagccatcagcaacggtaccacggatgaacttgagaatcgactggtagtgctcaagagcgttatcgcttcgcatgaggtcaactgtttattttcatacgtcagtgcttcgtttcatcgaccgtttacaacaaccaagattttacccttattttggagaatgatgatgtggttgagcttcataatctcaatggcagccaagtgctccgaggtctgcggttgcgggcaagtttcgtttccggcaatcaagaggagggcggcatcctaataaaatgatgttagcctatcaccgatcccttgaggtccgaattggtgcagtgagggatgaaacctaccatgaccgcggctcctgaaagcatagtgctcatctgtgcaaagctgattagcatcaacccttaagagaagctagattccctaaggtgcgcaagatgcgcaagggagtagatactaaccagaatatcgtgacctatgattgaagattagcggggttttaatttggacatagacatatttagcgaacataccagggcaatcaacgaaactattttttttggatcaaaggttagcgtataccagataaaaggagggaccttcgggttggaggtagactagggattcgcgatacctgacatgacgctatatcataaaattagatgagggccacttgaggaaaggctctgagtttagacttcagaggggaggcagaagtacataccagcaactgataacgacctgtacatccctcgcgctcacatggcgggtcgacttccttctcactcttgaaactcttgtaacatgtagggcgagggcactcggggctgtcacacttgtagatcttcgcgttggcgtaaccaagcttaatggtaatattgcgctcaagctcgttcttgaagcggacggtttgaacctcagaaatagccttgacgacggtggatttgccgctgaaattatattagtatgtgtgtaggaagaaaaaggcgagagaaggtgtctaactgtgcgacatgtccgatcgtgcctggtaatcatgtcagtaaatttgttatctagtaaaataggtgcgtttctgaacgcgctttcaaagacgcattcacaaaccaacaatcacataccgatgttctgagtagcttgccgagcaatgatctcaggcgaaagaggtgtcaattttgacaagtcgagggtttccgggttaggctgctcgggcagttctgggcgcttcgggtggggagcagagtcagccttcttcatggcagacttgagaggcttctcctcctgctcgaggggctcctggtcctcaacctctccgcgagcgttgtgggcatcgagcaaaggtgagccgggctgggatccctcgtcagagaaatcgccgttggaagccatatttgcggaatgaaatagaaaatcaactcgcgatcagcagcaaagttgaatgaaaacgcaggtggtcggacgaagctggtggaacggtagaaggtggaaggtcggatgaaaattgcttcccgccgatatgataatggaagaatgtaggtgggggattgtgtgtagtggagagccgggcggtgtctagatggcaactctacattacctctacgttataacggttttagtaaatatgtatagagaatatagttcaattagacgtttgttcaagtcgtttaatatagtttaaagtgtcatggtttattgtgcgtgattcgttatcttctaagaaaaaatccctaactaatatacaactcacaccaggtacgccacatcggttttatagagcagtgagggatagttaacatactaaatcattcttattcgacttgaatttaaagaaagaactatttcaaaccataatcataattattttcttgggcaatagactcagcttcttttcatacatactcatgatacattggttgccactgaggatctatttgacggcacaaagggtataaaagtcggggagcaatgagaagttactcatcgtcactatcactcgatgactccacttcttcttcagagtcgtcttcggagtctatcagtgtagacggatcctccgcaggcaacatgacaaaggcagccaagcatgtgatgcggttaccagtctcattggtagtcaagagctttccaatctgagtcgtatccttctttccttgctttgctgcggaaacctctttcccagtaaccttccaaacacggacgactccgtcactgttgccggtaacgaccaagaagtcgttgcggaattcctttgcttgaccttcaagagtgaggatttcgaaatccttgatgcggccagggaacccagcttccttcccaccaacctgagcaacaggggtagcatgggaaattgagcattcggtatcatcctccgcttttttcagttctttggttgaatagaagatcactcggccatcctctgtagagacagccaagaaatcttccttttcaccacccttcaaaggcaaagaaacatacttcatctggtgaagtttgcttcgtgggctaggaagaagtctgcatctcggaatcgagtcctatgccaatagtcagaaatttgatcaacggtataccatccaaataacttacaatcccgaacacgactgcaccccattcgaaagcaacggcaaactcctctccttcggagtcccatgcaatgcgccggccttctccagtgctccatctcgactccttgacaccctgtaggacttcccgggtaaagttcaacacaccagccttcctgccggtcaccagattccacaatctcatacatttctctcctcgcccaacacttagcattagcttcatactggggtgaaccgcaaagtggttcactccagatggagcagctccgggaggcgctgtgtcaccgcttggccgtccttgaatttttgggtttggtgctttgatagttgatacaacggtccagtcacgggtcttggagacggaaattgtgttatcctctccggctgcgagtaacttggttcgcgaagggaaattcaacgaggttatactggcagtgtggtgcaacaatgatcctagctcacggttccggggattttcgaggatcttgtttccggcgaaggtcggcacggatggatagtcttcattcacggcaggtggtgcggcggagatcgaatacaagttgatgcgctcatctgtactaccactggccagcatcaccttttgggcatcgacagggtcggtgggcttaggtagtggcgacaatgctagacaacgaatggcagatccatgggcttcgaataagaaagtatccatgcattggatggctggagagtcagcctcagcctttgctttcaggctggaggctgggatcccgaccgtgaagccatggagcactcgctcataagagcccgtgacaatctggacagtgacagctgcatcgggagtctctgacggagtagggatggatttagtaaccttgggaggagtaccagccgtcttgtcgtccttggaggcgtcggttctcttgcgtttcaccatgattgctcaattaatgattgtggtttctgttatattgtagatgtgaaagcttggtctagagggcggacaactttttttcttttttctgccagatgtttatcggccgccttgataggaaatagattcatggcctgaatgcctcaccgccattaatatgaggtgtccaatatatatatgcctgaggcgtcacacacgcaagcggagtcagaacaatacggtgcgttaccagttgacgaagacagccttttttgaaacgcagaagtctctcacaaccatattctagtttaataagatagaaactattcttgcattctctaatagataataaacattattttttcattcatcatcaaagagaattcttttgaagtaccaggtacctggtcaagccgtgtattttttatagagggagtgagtaactggttgtacctaaaccaacatcttcccgttcttccacatttttcataccgccctgtaacctcattttcacccccttcgaaaagatcctgctctaggtgcttttcatcgcctcctaccctccacccatcagtttcatctttttcgagcgattttttccatctggatgacctcgctcgaccagttccccttgttcccgcgttaatcggatgctgcgttccgaagctagactccatgctccgtgacgagctcctacgatctaaaaacgatgagatcgcgtacgtattaatttttatcgcgacggaaattcgattgcgatgcctaaaaaacgatgaattcgtcgctaatttggtggttagaaactgtttgtcgcgcagaaagcgcaagctcagcgcattgtatctagccacggtcgggtttggcgcgaccgaggacgctcattaccaccagaaagaacaggccttccttgacgccaatgatctctccaagtaagtccagtcgctttgatactctactagtggggttcaatttgcatttatttattttggtttgtaatttctcaatgctgattccctatccagaggtcgttatttcgatgaagctactcttccaacgccagcccatgcgcgcgcgccctcaccaagtcgaaatgcgattcccccgacaacacctgccagcactagtgccgaacctgtcgccggggctactccacccttaacggtcgatggcgtagttccgaatgcgactgagcctcaacagcgcggaacgcccgttctagaccaacctcggaccgcgacacctaatctccctcctacccccgtggatacaaccggaacaaatcagctctcggtgccagcaatcagccctaagctgccaaaggacctcaacgtgccaccgatccatgtgcagtcactcgacgcatcgcgcctcgaccagaaatgtagtgtaccggtaacagaaacgccgcttagtgcctacgagcatgacgagaatcgagcaaagatatctccccgcgtgtcaaagctagctgctactggagttccatcactggagattccctccaaccctcttcgaaagaaaaacgaagcacgaccctctcttaccttgggaccatctcacgaccaaccaccgtcacccgcctcctccactgacccctacaataataatacacctgttcccgttgccgtatcacccgacacaagccccgcagaagaagttactgaggataatgggacaattgatcgcccggaacacaagcatgaccgatttgctcatgctcgcccgagcttggttcccttgaccccagatgagcaattgcgcctcgaagaagctcagtcgaaatctgataagcccttgaatgatgtggtcgccgacataccttcatcgaaagaggtgattgtggagagcgtggacaccggtgccgatacagatcgcatggatatcgaccaggaacctgctcccgtctcgtctgaagcgaaaccatcacaagaacctgggacgactgtgcaatactcgctgtcaccaaccgcacaggccgaggccactgcagattccgctgtcgagactcccgtggctaaaaagccttctatcccacctacgcaacctagctcagcgcaaccagagcgcatgacgactcgtgtatcatcgggagctatacgacacaagtctgtttcagagatcctcggagaaactcctaagagtacccctcatgatagaagccacgcagccaccccatctgatcaaggctcccctgattctgtcgcgagaatgcgcttcaaggaccggaaggagcgtgagaaggagagaagccgactatccactgttgtttttcccaagcagccaactcagcaggagaaagccgactctatggagctgacgcaccgagatatggatgcagttgccaagctgaatgaggagcaagactatcttttcacgttatttttgaacagagcatacgctcctccccgaggaacaaacctcaatactctgctggcgtctgcgcataagactttgagcactagcaatcatctgcttgaataccaagaacagatggattgccgtactctccggcgcatctatgctctccagaatgccaatcgatggccattgcgacaattaaaacgctccgttgaacctcctcgccagggaacacattgggacgttgttttagatcatatgaagtggatgcgaaccgacttccgggaggagagaaagtggaagattgctgctgcaaagagttgtgccgattggtgcgcagaatatgtcaacagcgacgtggaacatcgcaccttacttcgtgttcaagcaaagattccagcgtcaactctggcggaaaaaaatccctctaaggctggtctcagcccatcttccgacgttggtgatgaaatgtttggtgtttctcaccccactccagatctcatcccatccgccgaagaggaatcagtcagtgatggattcaatgatgagcctcggcatgatattcacgacaccgtcgctcctgctgctattttctccttgggctcggatgagttcaacttctcaattgacatgacccccgccgctgaaaagctgttggaggaactgccaatatatggaccactccaaatcccccaaggcacgaacacaccggtattcaaagtctcccctgacgcagtttggaaaacggaactgctaccagtgtcgaaatttgcatcggcgaagattagcttccacgatgacgagcgtcctcgcaaacggagtcgatatgattactcccagtatggcaatgatgcggacaatcgcatcaccgaattggcacctgagcagacaaatgtcgcgctgttccgaccagagaacaagcccattcgtgatcggattcaccctggtcatcaattccggcctccgactgaacaccccatgccttctgttggtttctttgaatcacgttcgtcctcacaatggacttacggtgaggatgatgaactccgacgcttggtcaaggagtactcttacaactggtctctaatttccagctgtcttaccccatcgtcgctcttcacctctggcgccgagagacggactccttgggaatgtttcgaacgatgggtaggactggaaggtcttcctgcagatatgtccaaaactcaatacttccgagcatatcaccagaggcttgagactgcccagcgcactgttttggcccagcaacaggctgcgcagcaacagcagcaacaacaacagcagcagcaaggcgtcaacgctccacctcagccacctgtccgccggaggactactcagcctcttcgggttgaccggagacgatcttcgaagcatcttgctctgcttgatgccatgcgaaagctggccaagaagcgagaaactatgcttcagaaacagcagcatggtatgtttgaaatagacgcaggtcaccttgtgccaagaactccactgacatttcatctcttagcttcccatctcgcttcattgcgaaaagccaatgaggctaaccagcccaagcctccgatctcgtctccggctgagttcagccggttgaagtacgacagagagatgaagctgcaggaaaggcaggaacagtaccgccagcaaatgattgcgcagcaaagagtaagtggttgttaacgtccctacctgacagcactgtggcttaccccccatataggctactctcgccgcgcagcgttccggccaattacctaaccagcagcaaatgatgaatgtgccggggcgtaacaacaccatgcccccaacttccaaccctagcctacccagtgggactccgaatggaatgacaaatggcatgccctctagtgccggtgtcaatcaagcccgcccccttccaatgcagaacatgcccaatggcgcacagcccaatggccagatgcctaatggaatggccatgaagatgatgccgcaagctcaaatgcaacaaacaccaggggcacggccaggcctgccaatgcaagcctctcctgataacacgcgcgtgattcgagaagccaatcggttgcaggagcagcagcgtcttctccagtctcggcaacagcagcagcaccctcagcagggccagcaattccacaacccgcaatttgggtctcagggatcgccgaatatgagcatgccgaatgttaatggtcctcctaataaccctgctatgatggctgccctccagaaccaagggggaatgcagagtccgtcgttccatggtagtacaccacaaggcgtctccacgccatcacctcgtatgggtcagcccaatcctctttcgagcggtgttgttcctcaaatcagcactctccaaagccagattcaacgcacgaacccgaatatgccccccgagcaagtgaccaagctggccacggatcgactcaaccagtatcagcaacagcaacagcaacgcttgtcccaacaagcagcgatgaatgctgctgcaggtagcatcaacgcaaactccgttcaggccaactaccaagttccccacgaggctagtttccagactccgaacggtggttctgcaatgcaggtccctcaaaaccaagggttctctccaatgatgcgggttccccagcccgttcaacagaaccgcgtcggcccgactagctcacccgccatgaacggtagtgcgcccctgcccagccgtagcgccactcctcaaaaccagcgcagcggcagtgcccaagctggcgccgttcaaggttccaacaagagcccacacgctccagcagcccagaccgcgaccagctaggagcttacatgtcctccctgcaatacacttgcaaatcctttattcctccccacattaccttcatctgtacatacttacaccaacccttacgctgatttattttctacactttgtctttcaccgttgactcggattcttgcgctacaccaacacctaaacctcccccatttgttgacctctaccgcatgcgtgctctctatttttgcttggctttttgaaaaggatgttcatcatttatttgaacttcatatgcactggctctttttcaccaagtgctgctctgaattctgaattccgggctttggtttgtatcattgggaataggcgaaactggggcggacgaattactctaggaattgagatgaattgtatgattagttaggatttttttttcccaccatatttctatgtagtttaatttcaatttgtagctctgagagttataccactgatagcgccaaaccccgtccttccacctgtctcgccgactacttgcagtcctcatttatatgacttgcttttctaattacttggccagaccctcatgtgagctcccaattttatttgtgaagacatcaaggagcgagttgaaattagaacttatccagagagaactttgactaaactacatcccgtcaaagacgtattgatccaaaactagactatttcctattcaagtgaggatataacacacaaagtaaggaaagtataggtttattgtgcctgtatctcttggctactctcaatcttgatttgagacaaccctgcgaactagccctggggatttctgaatattgcaatatgaatactccgaacgaaagcgaaattcaaatagaaacaaccgactgacccaatgacttacttcacttgtcttgtctggccaacgaccaatccaataccctaggtggtttgggaactggtttctttttggcacgctttcgcttcttcttttcatacatcaaccacccggacaccggctgaatcgaatcaagtccaggttgcctagtgggaatggccgcgttacagcgcttcatctgttagttatttcccacgaaatatagaagggttcgccggtaatcatggcctccagaaccatctagcatcgctccactcgaagtggcttgtatgccgatcaacccggccaacatcacagcgtcgaattcgtgtccaagattattaactagaaccggcacggagacatagcccagagggactttctctgtgtctacgcagcgtgacaaagcctcatcaagaccgaacttcgtgtctcgtatcttaaagtcttgcgaggatactggaaagattgactctgggtgaagcaactttccatcattactccagaaacaaaagaccgatatccagcctatcagataggttggcctgctagccccgcctcttctgtccgcacatttgctccagaagctcagtacatccggtgcttcggggttgtcgaaggcagcaacgaagttgttaagaaccggtcgaagaagctgagcaaatcgagcaggctcatcccctaggtgagctagctgatcaagcttcgttgccataagtgcccagtcctcacgctggccgagtaaagtgacagacggaattccgcaccggatggtaaattggtatgggaaatacttctgtatagagccaatcatcaatatagctgccaccacctcatcggatgcagtcgtggtactaaaggctggcataatccagttccgtagctccggattcacaatatgctcttccattagtttggtcatatccaacgccatttcaccaaagtccacagtgtccatggcatcatttgtgataatgtttaggtgtactgaatccttacgcgagacgaatagatgtcgcagttcctcggaatgtgctactatgaagaaactgagctgcgacagaatggtaaaccaaacatcttcgggccggagtataaggttgtggtgatgactatatgcgttgaacacggcccagacgaagccattttcggatgcggagatgtgggatgtgtccaagaagtctttggcaaatgagttcccgatcaactttttgccgtcgctatgctcttttggacaggatttttcgaagagctcttcgaccttggctatcctctggagtccccatgcacgcggtggatttttggttgttgtaaaagtaataggcaatttgtcgttgcggaggatgaagcttaaaggatcgaaaggaatcagagaaaataggtcgagtacttacttactaacctagagcataagaacgaataactacgtaaccttttaaaatctactccgtagattaatgcagtattctataaacaaccgagttattgcgtattctagcttctagtatctcccaaatggtaagaagttgacgaagtattctactctctttatttcctagaggcaagcagtgaaagatcactgaccgagagcagatcgctgatgttcgtactgccatctttcgctaataccgaacgttcgctctcttctagatgccgtagaagctttttgatgctttctgcccggccacttacatgcaggatgttgccaacggcagcatgcagctgtaggtactggacttcaggaagaggaaagcgaccgtcgtgactagtcaatgtgacaatcctgtcttcgtaatagtataccgaaatctatctcgccgaagacagtttcggctaagtcgctcttgttcagttcgaattcctggtgtgataagggagttgaggtcttcaaccgaatcgtcaaagctaatatggggggaggaagtgataacaggccgtcttcccactcgtagacagaagaggacccagcatcaatgctggcagctagttggccgagttcatcatcgttgtggcagccggaacatcctctgacaaattgacctgcccatccgaggggaggtatttgaagcaagtctcaaggaatttcttcgtatcggtgttgagcgcttggtagcttgcgagggtcgcctcccaaggctaattttgcctcggcataggtagagaagccgacggatgaaacagcagggctgagactactactatcatcttgcgacagcgacattgtgcgcgacaggtggcaagggaccttatatagtctgccacatggatagtggggtggtcgtggcgggtgaggattggggcgagccgcactcctagccaatgatcctcatcgctacctgagatctaccggttttgttggttttcagagccttctggcgagtacaccatattcagactgaaaagagagtaagaaagtgatgagggctgagtgacgtgagatggcttgaaagagtaaaaggtaatgccattgtggacgtaagagagatatcaggcgtctcttttgatgtcttttttgatgtctttctgtgtgttttctggaaatcttttccccatgtcaccatagccagaagagtacggagtaagaggtgctgagtcctgactttttgatgtctgttttcacctactggcaaaatcgaagtgcataaggcggtgagatcgtcgtccaggcagtgggcggtcaaggggccagctggacagcattccgccaggcaaatattcaccaataagagacttagcacggcgggcggtatagcagttcagaaggcggtagcacaggtgttaaaacattcctagcgcaccgccgtctataccaatttagccgcgcgcctccaattttgccaccgcccatgagctagtatcaattgctcctcgaggtcttgcttccctattaagcactccatttgtttcaaatcaaagtaccatcgcaatgtctacgtgcgacaataatgagggcggaaaaccgccctccaaaccaatctctatatctttatctagttcaaagggtccttcgaaaaagaccggtttcaacctccaatcctcaaatcgcggccgttccacaacttctacaacaaacggccagtcactgcctcggcgacctcaccagctcggcgacgctgatgagtccgacgaagatgaagcccccccggtccacgaggaaatctcaggattcgacattcacacaggcgtcgccattgccgcggacggacagacagtaacgggtgcgaagaagccactgatcatccccgtcacgagcaagaacaactggcgcgaccgggcgggagtcaatgtgaagaaaggcaagaagaatttgctgcctagcgaggtacaggctatgcaggaagcgcaaaagaacggacaagcaccccccggagtgcccacagtagagacagatacgcccagcgtggcgtacgggttgagctatgcacagcagtcagcagaccaggcagtcactggcgcagcactgaacgaagaccaggccatgcctgatgcgaaacccgtcgagaccaagcctctcaccgacgaccagattgctatgcaggcgctgattcgagaaaccaacggggaggtagaacgtaggtcagaccttgtgattgagtctgctacaaaggacgaagaaccagttcactacagcgagctcggatccttccgaacagatgtggcatcccggcccgagcctgctactttggacgcctacaatgccattcccgtcgaggaattcggcgccgcgctattacgaggaatgggctggaaggaaggtcaaactatcggacgaggaaactacagcagtgccacagctgcagacaaggcgaaaaacccccgtgttccagaacgacgacctgggttcctcggcattggcgcgaaggattcatccggcggtaagggagctgaaaccgagctaggagcttggggaaagtcggctatgcgcaaggcgtcaaggaaacagggggaggagaacgataaggccgagggtgtgtacatgcctatcacgatgcggaataagaaaaccggcgagcatctcaccgaagcggaactcgctgcgctacaaaaggaggccaagtccaagcctcccaaggaagacgattggcgcgagcgacgggatcgcaaccttgagaagagcggtcgggacaaggatggagaccgggaataccgcaaacgcgactacgacgatgaggaggatcgttctcgccggaagactgggtcctcgcgacgtgaccgtgaccgcagtcggtctagtggccgccaatcttctagccgttcctctcgatatgacgatgacgataaaagcagacgggatgaccgttcctatcgggatcgagaccacggccgggaccgtcggcgggaccgtgatgatgataaggacgatcgaaggagagacggagagcgagagagagacaaggaccgcagccatcgatctcgagatgagagatacagcagctcgcggcactcgtctcactcatcacggaacgacagagaccgagaccgagatcgtgatcgcgactctcgtcgaagtcatcgcgatgattaggggctagattttttggcgaaagattaagggtattgaggcctttgtacacgaccaattgctgtttctttggagatacatattccctccatctagttattttaccatgagactcaaccaaaagagataccctgaacagtcaaatcaaaatatatatggctttggccaaagaacactttccatgatacactgttcaattctataaagagatggcttttatccttcccacccatggtactccaagaacgaaagcgccaaattcaatgtacaaacggggcaaaaggctaaagccagactatgcttccaacataataacgtccttctcatgctctccctcgtcgctgacattgcccacagtcaaatcacgaagaccaccaagtccaacgccaccatccatctcaccgagaacccactcaaccaggtagctgtcatcgaccagctcctcaactcgccggtagtgcctctcagtgtacgcagccagcgcctggagaatatccttcagaccagccgcggcacgaccctccttcccgcggacggactgggtcgcaagctccacgaaagtggacgcggggtaagagcggaacagagcatacaaaatgcgctgtgacacgcgcgaggtgcgtgcattggtgttccagtcccggagacggagcaggagagtgcgcagattggcagggtccaagttctgcaggacctcatcaatggacgggttaccggacagactggccgcagagcgctcgcggtcctcggccgggagggttgggtcgtctgcggtgttgatggcggaggtgaagagcgagagcaatctacccgggtggttgagttgcagggccagggtgatggcttcacggtaggcaccggcgcggatgtagttctgcagttcttggtcctgttcgacgcgagcagaactggcgttgacagcggctgtgtaggtggatgatgtcgtatcagtccagaaggtcactgttgcgtcggcagaaccggaggcaagggcgtagggagtggtgttgaacttggaggagattggcttcacgtctgcgcgtgagccggacggagttgggctggctagcgcccagactcggtcgatgtggttgtctagggtggtttcgagttcgcctgtgtagggggaccatatcttgaccagaccgtctgcggccgcggaggcgataagggggtggtcttgggtggcgtttttgcgtgctgttgtggcctcttcgtcatcctcgtcatcatcggtttggttgttcgagacctgcgggggtgggagccagaggactttgagaacactgttggtatgaccctcgaaagtcaagagacagctgtagtcagacagactccacaatttgacggtcttgtcaccagagcctgtgactgctaggccacggcttgtgctagtacgtgaatctgagttgatgatcggtgtgccctgcggggcgaatcgcaccgaccaaacacctcgcttatggccacggaggacaccaaccgacgagccttcgtcggcggcccagatcttcacggtgcgatcttgtgatgctgaggcaaatagctcggacgtagaatcgacatcaatagcattaatatctttttcgtgggccttgcgagtatagacggccttaggatagtgtggcttttcttctgtcagtggagctaacttgcttgtatcccatcgcttgattgtgcgatcttgcgagccagtgattaaaaatgctggtgggtggttcaaggggtcgttatatgcggcactgccaacaggaggtggcacacgcggcagggcgattgctcccaacgattcggcgtggccagtgaatatagcaaagcaagtataagaggatgtctttgggtcaatacgccaaagacgggctgtattgtctttggcaccagttgctagccagtgtcctgaccaatctgcatcaatgcaaatgataatatcgtcgtggccttccaggtgtgtgacatcagcaccgaaatactcctctccctgatttgagggtcggtcttccgagggagcaaccgaaactacacgaatgctctcggtgttggtggccaaagcaagcatagatcgatcaggcccaatgtaagccagatcaatgatctcgtcgtcattgccggaaatacggcggataatcgccaaaggcttcaaagttgaccctggcttataatcagacagcgactcgagcgagtggagccgaagagtctgatccgcatgaactgtaaggacaaaaggcaaaccaggggaatactggatagcgacgacgctttcgaactcctcgccagcctcttgttcctctgtgatctcacttccacgattgcagtcccaaactcgcaatttgccattttctccacctataacgcacagactgctatccgcaatgaaagccgcagcttccacgctctccaaaacaggaatgattctgcgagtcttccaagtacgcgcatcccagacgatgacagtcttgtctcggctggccgagatcaatgcgttctctgacggagaaaaggacaaactgcggacaagtgaaacatgtgactcgagcgacgcaatggactttctcttgtgcagatcccatacacgcattttgccatcttcactgccagatgctaggcggaatcctgcagtagagcccgtacgggcggagctttccatatcttcatcatcatcctccgcagcttgttgcttagacttgttctttttggatgacttcgcatcgctgtcggcagtaggaacctcgaaaaagcaaagcgcagaaatgacaccaccgtgaccatggaaagtgtgagtgacaaaaccacctctgatatcccagaccttgattgagccatcagcaccaccagtggcaagcagtgtaccagtaggatcaacagcaatggtcacgacgggagctgtgtgaggcttaagggttcggagaagttttgcttcaatggtctgggaagtctcgtcaaaagttgagaggccgtagattcgcatggacatcgagcgcgagcagacaatagcgtgtgaggcggaaggcgtgactaggcgaattgttagtgcgctattctcaattctcaaggcatagaatacttactggccaaacctgtgacaatttctccatcctgtagcgattatgtggttagcgctttgcaattgacgaatatcccaaggcgacaaaacatactccttccaggctagcaagctggtttccagtctccaaatcgacgatcaatgcatcttcgcccacgcagctcagcaagatgcgcccactggcatccagcgcagtgctaccgccggtgtaaatggggcggagcgtacgggacgcctcgaaagtggttttgacgatagctttcgacatgactctgtaatatatcggcgtaaaaaagcagaatttagcacgccattggccagtcgaagagccgtagagattgaacgatcgcaaaaaactgcagctcgagcgggcaactttttttaatgtttgcactgtttgtttggtgataagatacggcttctgcctcaggccaagggcagccgcataaccacagtaaccacatgctcaactgctggtgtttgtctgattgtgcttcatcgcctattacctttacatctacgggttccggcaagttttgcacaaatggtgtactagaaggcgatgtgactacaccactagcccagtgaccttgcacgacatgggtagacaggcttatttgaaccggctcgcattggtaagcttcatgttttactcaccagcttttcctatatttgcagttgggaaatcttgggtctatgggctgtaatccaacttgtttcagttcgagaactttatggctttctgaaaccgaaccagtcaccacccggccttgtctctttgttttatcctgatatacaagcccatcccaaacgcatcttcccatacacgcagaataatgcctagttacaaccggatagtataccatattgactgattttaagggccggtccccatacgaacctcccgacaatgcggcggttgacccctccaatccagttcgacggatttccaacgtccatgcagacaattatatgcagcaatatgatactcgagggcaccctgttaatcccgagtctagaaccctcggaagagaactccgaagagcaaagaatgacatcctttcaacaatggggattgtcgtcagtggagaagaccgaaactctagcatccccaatgaacaacaaaagatcaaccagattgcgagtgaaaatgacttcgggctggtcataacaactctcgatcaactgttcatctttttcggtacctggtggacctcttcagtcaccggtcgagtacaggtaaatgcaccaagtaccttaggtgttgattgggctgacattagagacttgatgttcagacttaccgacattatgcccattccgcattagtcagtgtcgtacagtctgagagagacaccgcagggattcttagcttctatttttcgggaattcctgcctgggcaatgtccagtgggttggctatagctcgtgaaaccccgatgaaacgggtgtttgtctctctccgggactacgttcaatctttgacaggcgactcactcggtgttcgttctcttttcggggttttttatacagcgtgagtatctcattcgcccgttcgaataggaaacacaactgattacgaataaagggcgagaaatgctgtgctcatattgtctatggagttctacatgtactccacacttcaatccctttcccttgtatccccatatggaattcctggcgtgcaattcctgcttcccttcagcggagaatccttgctacagctgccacccttgcccactgatttctcccctcagtcaatggggacttcactcgtgaaattgttgctctcccctggcgctttagtgtttctctatggctactacctgcgaccagagcttgaagagcgcatatatcggttgatcagacgacaccttccgaagccagctcttcctgatgaactttcagtccgcgttgcctttgaggaaaatctgatcgagtgggtagtgcccaccctgggccgcagatcagtcgaagaattacaccgcggcaagctcacactatttgaagacatcaagcttgaactgtccatgcttcgaatatgggtatcatcgctttttagaccgagatctacccaaacgttagagcagcaagctctcttgtcctttagagacgaaaggattcaaaatctacgcaacacgattgagctgttgcgacatgaactcggagaagacaaccttgtttccgatgcaggaccaaatgatcccgtgcctagaccgccggggattactcctgatgcccaggttgccgctcttgcatcacgagcacgaccacggccgcaggatgcaacgcatttgactcaggcagaatcagttattgggctgaatcaagtgcttattaacgaagatcgtatgtctcaatcgcctggggaaatgagcaatgactatttctccgagatagctactgctggacgaacgagtcttctctcggccacttcaaccccgcaggaccaaacagcccctttgcaaaatggtgaggaatttgctatggaccgacagaactcgcggtctaatactctcttctctcacccatcatcaccagaaacatcacctcctacgtcgcctcgcgtaagagcatccttgattcaccagagctccgaagttatcactatgcagcttgagttgatgggcaatcggaaccatcagccccagacccaagctttaaatcccgcccagctgaatggactggcacgaaatgatatgtcagggtcaaatacaactccagatgccatggacagacgatccatagccgagttcctcgaggctctgatcttaagtcaggcccagcgtcaggtccatcagcccccggcagatacggacggcctctcaaataccaactccgggccatccaacacaaccccccaagacttaggtgcctctgaattagaccctcaaaatccggccccagaaactcaagccaccaacgctccagctttagagtcaatcgagggagcattaggatccatcgttcagaacattctcccagatggcgtggaagaaccaaatgacgaagagccctccaatgaatcaaaccctgtcccagataatgaagacactcaatccgacaaccccgtccagccagtcctaccctcttctttgattcctggacaaccgacaaacacatcgtcgcaagtccaccgcgtcacccttctttcggcatacccagtggactcactcgcatctcatctcgctgctgcaatcagcggcatcatactcgcgccacttgaagcactataccttcgctcattgacccgatcctggattatctcacatccttcctccatcacccgtctctcagatgtccatccgctgggtctttggtttggcggaagaacttggccagatatgtatgcttattcctgccgactcgtgctcatgaggggaatgcaaattgcgatgagagcgggtatatgggggttccttgtgggctcgacaatgaggattgggaggaagttctgcggctggggaaccttgtgatgaacccttgtttctttaagccgcctagatacctaggtcactctaccatgtttcctctattttctcgcactctgtatcttaaccataatattactttaatccatatgcaacatgataggttgatagttgtttccatcagtcaggctgaaaaatttagtaccaatgtgttgtatttcttttgtcttctgatgcagcatttgcgtctactttaccgaacgaacagtcgaagatatcaaaaaaaaaaacaaaaacaaaaacataatttcgtcattatttgagggtacattgcatttgctctcaaaagatacatgtaaacacgtagaaggcaatagcaagttcgcagcccgagccaactcctcagataaccatctcagatcatgcacgcccctttcctttgttccctggcaccttacgccgctcccaaaccataagatatccctcacgggcgaacagcgtctcgctttccgcgcgcttgacgaacaaatcctgaatctcaagccactctggaccctgctgctgcttctctgtggaaccgccatttttggcgcgagtgttctcagcctccatagctttatcgtgaagttggacaagccatgacaccttctcgctgccgccacctgctccactggaggaaccgccggctcctgacgcagagttaacacccttttccacagcgtcatccattgcaccgggtgcggcgatagcaggatcgaggatgatgtttgcgacaagatcatagaggattggatcacttggtgaacaaatatttggatttggctcgacatagggggacatatccaaggagtgcggagagggaaaggtgacaatggttgggtttcgctcagagacaaaacggttcttgctgaagcgcttgatatggaagaaaaggtaaggaggaagagggtggaggagacggtgtcggacacggtgagccagtttctctgacgccgtgtagccgttatatttgttcaggagggtagtcaagggaacctgtgggatgatcgactcccgattggcagattggaagagaggtgtggggggtaggtccagtgtgagaatgaggaaaggagtaacctggctattgattatgccagattcagtgaataccaaacgggcattttgggtgtcagagtgagcggtgatagcttggctttcgatccgtacacgaccctgaaatgctgcgtgaacaacacttgtgggtgttggtgagggcttcttggatcctcctaaggcgaggtgcaggcagttcaaaaaccaggacaagaagtccacaggatctgcctggttcgtgagagtgaaacgtttcgaggatcgtacggcaatctcctgtagtaactcgtgcggagacacatgtgaccggaacgctttagggttccatagcttgcgcaccagcgtgctgaaacgaagaattatctctggtgtgcctggtgtggggaactcgtggagcagaaagaaattgcgaattggcaaaacatgtgccagtagttgagcgactacattgacgtagtcgttggctttgatgttgttcataccgacaaaccctgaaaagagacaattagctaaaagagtacttttccgtcctataatggtagatgctcttacctggtctgtactttgaccctgaaaggtcccaggcatcatgcacttccttatcgagtttgaccacttggttttttgtgtagtgtggatcaaccacatacttgatatcatccaaactcttgttgttgacctcgtatccttcaggcaaaacgtagaccttcttcgtgccgatgttgatgaagacgtggtgtccaacttcaagggcgtgaaaatatgcatgcgatttcggaccacgaccctggaagtatttgccgcagacgaggcatgcgtacacattgatgtttgacaaagtgacggagcacagcttctcgaaatcgaagtccaaaatttcgcggttgatcgtgtcgaggtagaggtcgccgtagccttccatgggagcgctttgccgcttcggagcgctgagtgcaggtgcatcttcgtcaatatccgagagtccaaggggattttcgccctcctcaagctcctctctttctatttcagctgctccttcgatatccacgccattgagatcgtcctgtgtcaactcttcgccgctcgttcggtatgcgggcactgcgccgttgcgagaatcggggtcgttgccctcctcgacgcgcgcccttttcaaaacaggcgagccagaggaatcttgctccaaggggagctctgcgtgtcttttcgacattgtgagatggtttggatcgaaaagttggtgatcccggggttctggactttccgatagctcgggatgcgactgcgttgcaaacaagtcaaacacccaggccaatgccaagctgtgtacgttctactccgtatacaaactactgttcattttgattataggactgtatttgcctattacttatccaagattatctaggaatctactccttacttgacctccgagcttgctacagcctaaatcatgccgaccgttggattatcccggaatcaaagaaaaacgtcgtaagatgtgatacaacaaaccccgtcgtttgtcgaccttcaagcactccggaccaccttatcattatccacggggacttcttgcacgccatcctttgtcacgaccttcactagcatctgtagataattgtgtcagaataacggatttgctcatggcgtttgaaagaacttacccccttgtagtcaaagggtagtcggcgcttcagctcgtctgtgcacagggtgaggagcgcaaggccctcctcgagggagcagtcgggatggtgatgtttgtcaaggatggagaggcagtagtatctagcgaagtcagcatcagtgatctcttgcctggagtttcgtccgtcatagcaggccatgaaacatactgggcatagccgtgggcagcatatggtaggggcgccagcgacgctaggtaatcaatccagtacaggtgaggcttctcagtgaccggatctataccacctagcagcaggtttactgtgtagggactccgtgaccgcaagctgcgcgccaattctccacggacgaaattggcaacggcggagggactgagctcagtatcattgcgcatgctgtagagtgcagcgttggcttggatgtattcggcaaattgaactaacataggtatatcattagcatcttgtttgtctcatcggagaagctacataccggtatctccagactcgccagagaaagccatcaatgtgttcttgttcaactgtcgtgtcttatcatcctcagccttcagaactgtcgggcctctcattgcagccttggatgcagcaagaatgacgaagtccttgccggcgatacccaaaagaacctccctagcaaactgttagtgacgttttgtatcgacgagatgaccataaacttacatgtttgcggtatgagagataaaagaagaattacaagcaagcagatgatcagagaaggcgaaggggagtagtggtcaagtgaggaggaccgcgcggtgagcttgacgcctggagctcccgtgaggtcagctacccgctgagtcagccgccgcttagcgcttttttttctgccaaaaaaaagttgaagttttgatctccgcagtccgagtctttcgagaacgccatagattcaatttctttatacagagatcaagcaccgacaggcttgacaaaagtcgccatgtcgtccttttttactgtacccaattcccagcgcaagaggaagagagacgaccgcgccggagccccaggatcaaaaaagcgaggcgtagatgccaaaaccgacggtggtcgacgcaccaaagacagagaggaatcgatctcgggcagtgacttggacgaggatgccgcaattgatacagcagagtcaggagacgagagtggatcggactctgaagatggcgagaccgcggcggatcgaagattgaaactcgctgaacgctacctgagtaacatccaagaagaagtcgacgaagctggatttgatgccgcggatatcgaccgagacttgattgcggaacgattgaagaaggacgtcgacgaatttaaaggacggacgttccgtcaaatcgcagcgaaactatccgttcccacggcgccccattcctttttccgctcagatacccagtcaaacaccgctatcgcagtccacccgccatttgtttacattgtttccaaagataaaactttgaccaagtgggaattggctacacccagtgtaccagactctacagaattgaacggcgataatgatacttccaagcgggctccgcgcccccagcgcaagaagcccaagcgtgtgaagtacgctcggggtatgcgcaaagttggcgaatcaggcgaggatcaaggacatacaggaagcatcatatctgttgctgtctcgccttctggaaaattcttggccaccggtggaacggacaataagcttatcatctgggatgcagagactttgacgccaagcaagacctttttgcaccacagggactcggtttgcagcttgtcttttgcacgccatatctcggcgatgagttctggagagcagttgttctccggttcgtacgaccgcacaattaagacatggtccatcagcggagctggccacgcgtatgtcgaaacgctcttcggccaccaggatcatgtcaccggagttgctgccatgaccattgacgaatgtatcagtgttggtgctcgggatcgtaccgcccgcttatggaaggttgtcgaggaaacacagctcgtgttccggggcggcgcctccagaaatgccccttaccacgagagcaacatcgactgtattgcccccctcccacccactcacttcgtcactggctcagattccggctccctctgcctttggtctgtccacaagaagaagccactctacaccgttcgtcttgctcacggcttggacccgatcccccctctggatgtgttatcacccgagttagacgaggcgactgccgcccacaacacgcgccacatgcgcccaatgcctcgctggatcactgcactcgctactctaccgggtacagacgttgtcctcagtggcagctgggatggtttcatccgcgcatggcgcgtctcagaagataaaaagacacttatcgctctgggacccatcggtgcaggcttacccggtaccgtgacaccaacagacatgccctcgcagcaactcaaacagaccctggctcttgataccacccctgtggctgatcaaaaggagccagagccattgatcaagggtgtcatcaacggcatcgcggtctttgaacgacgccctgaatccgatatgcctggagctgaaataaaaaagtccgagaccgagcacgaacctcgtggtttgtccatcatcgccgctgtcggcaaggaacaccgattggctcgctggaagtgcttcaccaacaatttctacgagggcgccacttcgggaggccgcaatggggctgttgtcttcgaagttccgtttgctactaatgacaccgtgaaggctgatgtataaattttgttcataatcttcttgtctcgatcttggtcattggccgaggataaaatggggagcgttgctcggggtcaggtgtatttggagtcacatctgtgtattttaccattttgcatatgtatcgaatttcttcggtgcattgaagtatttcaatcatatccccctttcaagcaacattgtccctgaagtttacacttcgtgattagggtaaacgatctgaaaaggtgcataggtacccgtttataaccttgcttccctccaatattgcaacgtgcgttatttcaacaaccgataaccaaagactcctacgacttgcctccgtgatgttgagatgtttgctggccgtgcttgtcagtttacttcgcttgtggatagggtatccaccaggtgggtcagtggtaaatctatttgtctactctggatggactcgtggactgttgtagggacatgtggttatcaaagcaatatgagcaataacaatactcagcaagccagtaagctttattaattcggcgagggattagaatatgagaatcaaggatttaatacggtaaagcccggtgtctttttcataaactttgtggtcactcttcagttagtgccaagagactaggttcgtcgacttcactgggaaagggcgacaaaagatcaagatcgaaccgaagacggataagtaggggtattgtattcgtggaatatggccgagccaataagaaacgaaacatgaagggtccagccattgaaggcagcagaagagaaaaaagaaagagaaaaagtcgcccttttgatatcaaaatgaagacaaaacgccagccatgtccactctcctgttatcattacccaagcgccgcgctgaagtcaaaaggaaacattaagtaggccgatgaaatgcgaaagcagatgccgcgtcggcggttggaagatttttttaatatggagagaatctggcccgtcgcctctgtgtagctcttctcactgggccgacaggctgatcttcgtcggagtcatcgacggggatcgcattgtgagcagtggtcccatgtgggataggacggcgcgcaccgggtctagcaggcctaataggcggcgaagattcctcttcctcggatgagtccggaattgtttcaggtggaggcctcgctgcaagccatgaagcatcgttgggggctcggaaccgttgtggatattgtggattggcttgacgaggccgtgtagtctgaattacgtcttcgtcggattcatccgagtcttcatcgaccatctccctgtcgtccgaatcctctgagacttcctcttccacctcttcatcagaggaggcatcggcatcaaagtaaggtgtggtggttctgtaattgagcgcagtcggtattgaatggcggccaccctcagcatcatccacaacggtgcctgtggaacggtctgattccgattcatacatatcgccactcccgagatgatgggcttcgctttcaatgaacgaactcgtgggcagatggtcatcaatgaatgagtctgactcgtcatactcattctcctcctcctcttcttcttcgtcatcttcttcgtcgtattcacttccattggtgttacctgaagcgagatagttgtcatgattcactgggagcggcgggcccagtgggatcatgggaggtccatgtaacaagttctcaagccggtcgaaaagctgccggtcagcacctggatgccagttaggacgcctagggaaggtaggcccgtaatagtgaagcgcaaagttgccccagacgccatcctggtcttcaatctcatccaagtggtcagactcccctagctcgccatcgccctcgccctcgtcctcattctcgtcctcaccctcacccccatccataccatcatccatcgagtctaggtcggtctcactgtagtcggccgaatcactgtcatctgtctcagaatctggccgatactgatagccacatgatgcgcaatcgtatccttcaagttcccacgagcagtgtggacatcgaaccactccgtcttcggggtcaggtttgggtgggggatctttgggcttgaaaagacctccgaacagacctccttcggttggatgattgttggccttgtcctggtctagtctttctgcttcgtccttttggttttttgtatgctctgtagtcgtttctcctttgtctaaaagctcagctcgacctgtgaaaatctgcacaacggctcgaacctgtaacacgagagatatgtcagatacaatgaaatgattgaagattatcaaaactcaccagataagctggtgctggctgggttttgacgggtgcccggcaatccgggcatgttcgctttgatcttccaccagcaaaccatgacgatagacactatatgaagaattatggtcagcgaagagaattcacgacagaacaagtagaaaggactcactgagtagcagaaagtatgcccgcaagcgattgtaaacggttcgtaaaggggacggatgcatataccacactgtatcagagtgcgaatatcatcgacatggccttgaagagtgttgaccagctagattacgcgcgtgagtttttaggtcacttgaatcagatgcgggacttgtcttactcccgatgcctcagccccagaaccacttctagctgccattttgaccttctagggctcgtcgagagctgtggtttccacactaggagcgtggcccatcaaccgaagtgcgtttaaggcgtattggggtgatgcgcgtgtgtcaacaggtacggtgggggtcccggaaggtaaaagtttcgcgaagtggcaaggtgtgatcaacagattttcgcagagacgaacgctaggaaatcgaggaacacaggcgaggatagcgtgacggtctgagattgagagaaagacaccgggaagagcaataatatgatccagattctttaagtgagagggcaggtgttttgtggcctcaggcagccatcacataatcatgaggaagggggcggcgcttcgagctggcaactttggaagtgactcgtcactttcttttatcgatggtccttatgtgacagtcacttctttgggacttctggcgcttgtttaaaggttatttattgtgaaaatagtctgcgtgacaagtgcaactatacctctcttacaggtgagagacttttctatatgaatgaagcctcagcaggtcttataacacaaagatgttacccttgtcttgacttcctttttacctttattgttggtttgaaatcaggtgagccaatagataattatttctattcaataatatagctgatcgaagcatatatacctcacttgacatatacatctcgcaccaaccggtttactccctcgacagtctccgaggcactcacaaagactccatgcagcatcattcaagccgaagcctttgcttgaactcgaggccttttatatttttaacatctgattaacttggagagaacattcatttcatatcatatcattatccaagcgattgcctgcatctcttgagatcttcttgagtaaaaaccaacatacaacttcaatttcctgacgaagattaaagcactaaatcatgacccgaagccccaaacgaggcttgcaagaccaaaatgaacaatcatatcgttcaaaatcaatgatcatctcattgcgagctcttcagagccatatggccaagagcaggccaaatatttttcgctcccctagcactggtgtctactctgtatcttatatctttgcttctctgccgcatcatcaaggatccccaatgtatcttccttgctactcacggagaagttgatatggtcaatcgaagtctatggcagagacaaggtcaatatccgcattccttgagacaatgtccagagccttggggcttttgtatgcgtcataataaatggcgcacatctttgaatggtttcagcaccttatttcattgctaatcaatatggtgaattcactccgctgcgtatcccccccgcaattgatattgggacagactgctcgaatattcatacttctttcgcacctctgggttcaaaatcccctttatcatttgctggctagtgagaacagctcgggaacactaataaagtgtttgtgcattgctttttttcaacttccatatgatcatttatatgttgtagtgctcgtgaatatatatgtggagtataaactaggaagttgcattctaagaatggaaatgtaagctatttcagtggatccacaaatcagacataactagaagccatgtctatttagatacttcattctagacttgtatcaaacccaaagtattacataaaaacatggtgctagttatgcagacctcgggattctacatatggcagatctccgcgccaagactgcggatccccaattcttcttgcgtccagcgctaacttctgctccaatcaacctctacctccaatctgatcttcgagcaacgctttggcattctattctatttgactatatcatttacctaaagtgtccattgcaaagacaggagcaataagaactcattgcacccatggcggccgagtcaacacaaggagacactcacgacaaagcgtgggaaagagcggagaagaagttcgcacagtatgtttcaatctttcttccctcctctatacttgtttgtccattctcaaaacatgatctggcatgtctgaagccatccgtgatcgcgggatcatcttacacggactatggggtcttgagagccacgcatagcaacacaggctagcccggtggttgcatctattcatcgggctgaatacacgtggcttttatctatactggtagctaactagctaacttgcgatattagtaaaaatgctagcgagtactacgacccatgccaagacttcgcagatcggagtctcaagtgtatgaaacggaatgcctatgagcgcgaaatgtgccacgattatttccagtaagtcggtaattattctgcgatttaattaagactttgacttgctttccgtgcaatgtactggctttcgatccacttctggccagcttgtacaatattgtcatgattatcatatttgagctttcacactgactgatgaccttttctagagcttatcgtgattgcaaaaagaactgggtaagttgaatatgagacctttgccatcacctcagcaatctcccgtctcgggcaggctatccgcgagatccattaactttgattcgatatgcgttggagcatcttcggtcgctaacaaggcacagctcacccagaagaaagtttctgcaacgcctcagcccaaataagacatctctttcatctggaccatccttatcgaaaagatcgacaactcctgactggcaggatccctgacatccccgaagcagttgttgcatgccgatgcgtagggtgtgctcgttgattaattcaatattcagaagcctgtcaaagctaaactcctaccttttgttcaggtgataagcattagaattgctgtcgggcatcatgatattgctaggctggtaagaaattccattcctggcacgtcgaaacgcttcatcgtccggtgctgacttgtgagagaagcagtttctctattgaatttgctttcctgcttttgaatcgcatattgtactatcttttgaatgattttaagcttgtatattaacattttgctatggtcttgtctatttcgcacaggtgtagtgcttctgatcttcatattcggtcgagtacgactcgtgcagaatatgaaacataactccttatttatattcacaaggtagtcacctgctgtcatgtaaccaacaatttgttaacatgtcccggttgacgtccgtatagacttcctgggtttgttgtcttctaaactcttttcccctttcgtaatgacattagtactccatcttgacctcgctgctaaaagcctgattacgtcaaccatccgggatgtcacttcgtcgcctaggtatgatattgaactatcggtccacctggaatcaaatgaatgaataatggtatggatttctcaatgagtgtgaagataagaagcagaattccgcccgaccataccgctctctaagagagacgacagaacatcgaattcccccgatagaaatgatcctcttgatattctctggaagacagccattcttcctactcctccatctccattgatccggtcgaatatcttcaattcctgtcttcaaattgattgatccccttaagaccagcaatcaagagaaatcgaccccagtgatgtaacggaaggcttgttcatcaagcacaacatcttgcatgttaggatgtcggacaggaacgttgaatagagcacaatacggtaataccattggagcaccaacaactgtggtcttggtcacatcaacttcagtacataaatagtgctgctgcatgttaggcggcttttggaggaggggtggcattggattctggcggaggatgtcgatgtaggctttggtcaagggtcgaggggcaccgggcggagcaagctgccattgctcaaaatgtatagccgtcttcttgacagagatgagaatcacaatgcgcacttctccattagaggctctaaatctccattgagaatctttaagtagccttggtaggctctcagagacccccgtttcgataaccagggtaggccattgaaaatttgtactagaagggcaacgtgcagaggggctgaaaacttggtctccctctttgccccgtgataaggagttatatcgtgtcgctccgccctaataatattcattacttagtctcatgctgatcagttgcagagtgactctctgcacgagtgccgaagtggtgaattcatggcgatgccctggtatcacgcgtaaaatacctgtactaccttcaaactcaaaccggtagttcacacccttcaaacaatcatgatcctcgaagagtcgctccgagatgcgatgggttgtttggagtagaataagaactggtttccactctcttcctcgtctttttcgagggtctcggcgatcttctcggcctcgagctgaacatatttcagtcggctgaatgtgcgagtcacggcaccagatgggagcgctgtcatgatgtcaggcatggtacgggcgaaagagcatcggaggacatgatatcagaggaagaaattcccataaatatgggacgatggactccgacccagaattagatcgatggacttgtcatttctatttttgagatacatcatggcagtatggtgaggggaccgactgaccgcctaccctttggtcttcttccccaccaaataaaaagtgaccggagtcgatcagtccactccaactcagatcattgaacttttttagcccatgctgtgcttcgcacagtgatcagatcgttctgcgaaaaacgccaattgaagaatttccctgcacatcgagcaaaacctccaccatgagctccagcaatgacgcggtgtttctgcgtcgtaacaaccaaatccaagatgccattgactcccagaatatgaagcaggccttacagctgattgagaagcgcatgaagaaaggcgagaacactcatttcctgaaggcgagtgatttttatcattgtactccgaattcaccaccactacgacgtcgttaactgtaaagaaccaactaacacgtgagataacaggcctggaaagcgaatgttctcttcaaccatgcggatgtgacacataaaaagaagggaattgcagaaaccctcgagctgtgcaaggccgatccaccgatctcggatttagactctctcgacatactccacagtacgctgcgaaatatggatgactataccgagcttcggagcgctatatgggaacgagcagcgaaggcaaagccacaggatcgtgatcttcagatgaggtggttcaaattcggctatgaggctggtgattggaagtcagcccagaaagtgagttgagacgaagcatatgctacaccgggatcatatgaaggcctatgttgctaacgagtgcctcctttcttataacaggctgcaatgagtctccaaaagaactttcctcgggagcgaaagtattatttttgggccatcttcctctgttacctcgtttcggatgacaaatctagttcggacatggaccgcaagttgtttgggacacttgcctatcgccttgctcagaaagcagtagccgaggttccctctaacccggtatgtgacttttttccaagattgcatgtcactggaagtgaagacgaatgaaaattttggacataaatgactgactgattcaaatgatttactacagaccgaattgctaagccctccgagagcgatacaaaccgccgaggaacttctcttggttgttcgaattctcgaatcacagtctcgttgggcagagattgtgcaggttctcaatagtgaaaatactggtctcagctctcggattgttaataacgacaggaccttcatgttagccaaagtcactagcctgggggctgccgaactctgggaagaggggcactcatacgtcaaaggcctgcttaccgtgcctgaagacgaagcagagcgcaaaactttgcatgagcgggatgattggaaatactggaacttgctcatcctagccgtgcgtcgtcttgaaaaaagtccagggtatgtcttccaatatttttacttctacaccatcaaaccctcagctaataaatggttgcttggttcataggctactttccgatacgcagcagcatatcgagaagttcatcgaattcagcccaaagtcccgcaacgcgcacatcgctattatggacatagtcctaaccggattcaagcggggcgagcggacagaggatgatctggttattgcgtgccaaagatactttgaccaacacaagcacaaactctatgcttttaaagacttacgaggggtcttggagacccgtgatgatgccttgattcaccgagtagcccaaaattgcttggacagtgtcgaggggaaacctgtacgtgcaaattctgctaaactcagtcaatgcgagctaatcaaaattctaggatgatgccattccattaatcaatgcgtacaagctgcaatactgcgaccggatttcagccaataaaaacgtattgaaatccagtatcgagacccttgtccgcaattgcctttacttctacgatgcattcacgcttttagcaaagacacaggacaaaaaacaagaaagccaaccagatactgcttccgcgatggaaagccgacccacagatgacttctgcatcattgccgcaatggcccttcttcagcctaacacagctggccaagcatctgagaaagtcagtaacactgccctgattcgcgccgccgggattctggaacatcttttaatcgactcacctcataactacgaggcgattcttatgttgattcgaatctatcttcttctcggcgctggctctattgctttgaggtggtttggcaagctgtctatcaagcagatgcaatatgaaagtgttgctcataacctctttacccgctttgccaccatccaccctcatcccgcgcctcttatagagggcggagaatacaaggactttgacgcgcaagttgcattcattaccgctctcgacttttatcgtcatgcaagcttcactatcaagaactctttgataaaaggacttgatgatgggacttacgtgaatctagatgacacaattgagcttcaaaaacgtatcagggacagtatctgccggagaatgtgggcactggacttacgacggatgcaaagaatccgcaaaggaaaccacttggcccttcacgaggaaatcggtcagcaattctcagtctcccatgtactcctgacatacttgaatactaattaccctatagcccagaatacatcaccggctcaagaccagcggaagtacgatggtttcatggacctagaacgttgtggcaaacctgcatttgagcaccgactgcgcgcaggtccggttcctggggtaagtttgttggcttgagtgacaccatggcaccgactaatgtgcatataggaaaattggctggcgtccgcccggcttactgatcgacttttcagtgttcttgagagcatcggcagtcagaagccagtcgtcttggagccagagctgcctgacatcggcaaattatcgctctcccagactgatgttgatcacactggtgccgagatagatgcagccaagattcacgtagaattgttgaaagtggctatgtttatggctggatcgaaggcccatacttccaccgaaattgagactgttcttggcgagatagaggattggttgaaggctaagaaagaggatctagctctggaagatactggaaattctccccttatcatgaggacgaccgtccacttcagcccaggcaccccaggtgcaccgacatgggaatatttccataccatttggaccctcgtggagaccctcaaggctctatgtaatattttcaacctgaattctcgaaaggctgtgaagaccgccaaactccctgccgaacaaatgaacggactgaatactcttgttcgtgaagttttcgaggatatccgtttgaacacccgaagtctgaaacagagccttattgaatcagccactctcagtacactcattgatatggtcaagcgtggggatacaactgatgagtacgagaagccgcttcaagaagtcttggaaaaggcgatggacgagtctgcgctcgaattgttctgcggagaactgagagagagctgggaggaggcacttgacggagtgctggctgccaggctctaattctgaataaatcatgtgtctatgaaaatacattgttagagtacatgtaaaacaatccatgagagtgttgatatcaacaagttcagatgaagtccaggtagtaagaggttgatctataaaaggagggcaatatctatcacgtgcacatgtcaagccacatggacttagttgcctgaggtgtcagtaatgacgctagtcccgattaacccagccctagccctagtcactcgcctaccgcaccaacgccaaggctccattttgcggttccaggcaaaagaccaggcgaatttcacacggctctctcacctcctcttcgacaacctccgccaaccccttcagtcaacaaccgtcgagatggccgaacgctccggaattgtggtcggactcaacgcgggccgggtacgttcttactgtctctttgcaccatgtttgtcgctcgtttgaaggtctcccaaggtctcttcttttcgttcgctctgttggtcaacacaagatcagtcgggtcatggttcattgcggaatcactgggaaatcatcgcggcaagaaggattgcgaataaatcgccgaacgaagaatatcagagactcactgggaaaaatttcgatgtcacgggaacaatattttgaattcgactttggcaccggtgccagcactcgccatgcacgcaaccctgatccgaccacgctatgaaccaccccgacagacagacacgaaccgcgaattgaagagaacattgggacctgcggctgctacatgaaacttggcgaaacagacatactgactgggtcctgatatagaaaaccaccgccctcaacacccccaagacccgcatctcgcgcaccaagggcaagtcttcccgccgcaccgctttcgtccgcgaaatcgcccaggaggtcgttggtctcgctccctacgagcgccgcatcattgagttgctgcgcaacgcccaggataagcgtgcccgcaagctcgctaagaagcgcgtacgtctactctcaatccttttcccgcttttgtatggtcggctctgttgtacggattacattggatttgggggtcgatttggtcgaggtcttgctgtatacagaatggtactgtatgggccatgcatgtcaatcatgcagaggaagagtcatctcaacctctgcttggacaagcccgtgcaataactgttctgtttatagcgactaagattcatgcccaaacctaatgattccactattatcagagcctgtcgatccattgagtcgacacttttgctaacttcgtgtctagctcggtactttcggccgcggcaaggccaaggttgagtccatgcagaaggttattgctgagtctcgccgcaccgctgctcactaaatttccggacccgttcctgtttttctttcgttttaacgactcgacgcaaaaaaagcgtgattctcggatcggaaagggggcgtgcatgaaggggaaggcaactatgggattccttctctgtcgtatggagtgaaaccataatgaaaacaattattcaaccattttacgtgtgatatttgcaattgagccactttctaaatggaggtttacaacgtagatggagaagcgtatacctttggctcaagccgagtgaggtttgattccatgtaaatatggatgcagaggcgacaacatttcactacacatacaccattcatttggtgttaagcctagattttcattgaggttatctataaatgaagtatgaaaggcatgtgattctcaagtctatacgcacatctaagacgttaatgcgtctcgaagggatgcgccacatagttaagtcgtgaatcatcaagagcagcacatgtcgctcccctgaaccaaatacatttcattatcccctttcatttcttacccggtagcttcagccacttaggcatagcaccactcttccgtgccccgccggacttaccaccgccctgagcgctactcggacccggctgtgagggagcaggcacatcttcttccttgatttcaggcggatgctccaccttgagctgttgagcttgactccgaagctcggggcgtagggtctccgctcggcgttcatgaacgaacgaggctgcgttatcagcccaagaaaagttgacgagcacacggccagccagccctagatctttaatcagatgcttcttgtctgatggaggtatggcgtttgtatgcttgaatcgggataccccgtggacagtgagaatgaagttctcactggcgaacgatggagcaagacaccctcgtgcgaattcatacaacgactgccctgtgtccgaggtcccaaatttggcgaccacttgactctgatctgggaaacggagcttcacatcgacctcgtgaattgctgctcgtcttgccgcttctgcctctgccttggcagcgatctcggcgtccgttggcaagcgttttgggcgagaggactcgttgagtaaccgctggtgcagttttgcgtgctcgatagagggtatgtaatcactctcattgtggtctaattttgccgaggaaggagtgtcttctgagggaggagagaagacagtaattgctcgaccagaatcggccgtggaagtggccggttcggaggtagatgggggaggggcgacttcgtctgatgcgacggtgacactggagggctcgggttgcgatgaactggagagctcttgaacaggctcattgcttgtactgtcagcgggagctgctgtgggcgctgcgttcttatcctgtgccggaggagcctcatcctctgatgacttgaagaactcgccaatcttcaccatggcttcttcgataggctcttcggtccgtcggaaactgagccgtataagaacattcccactattgaaacctagctgggctagggttttttgtagatctgtgaagctcgatacttcacgttccaaaatctgaaggacggggatctcatagtacagtcgtccggcgacatctccactatcggcagagggcgctgcccgtgaagtgaggttccgtactgggccactccctgcaactcccgcctcgaacttgcgtagtaccatccagagtgtagtcgtactgggaaatttatcaagtatgcggccattcggggcaccacgagcctcagattcgggcagttgcagggcgacggttacgactgacggggagcgggagatttgaacaagttcaagttttgccccagagatgagaccagacagacggtaggaaagagaaaggtctaattgcttgcgattgtgtctgttgcgtagagaagaccgggttagtgttgtcatcggagacaaggaacaccaactcactttaatgagtattgactagcattatatccaagcttcgagcatgcttcctgtaggatatcggtcaagtgtttggtgggagtagtcttgattgttgcccgcctggctgtcgcatcgattaccacaacgtgggcactcattgtgtatagaggaacactagctctggcaataaatagggaaggttgaatatctcaatcaagagattttaaacggacagatcaagataaacaagtgtgaaactcgaatgcggggagaaagacagcgcagaaagtagtcggaaggtcgcatacgaacaggcagcggtgcgggcgtcatctgagctctcgcgtacctcagagcttccccgtcatcaactcacctccatcacctcccccaacccgcccccttctcaaccactttttctcttcttttttcttgtgctttagctctggaatatcccttttatattgaattgcattgaaatcctgcaataatggtaagaaaaatgctccctttgtgcacatcgtccacgaatctctggacctcaaagctgaccgacttctcccatcacagtctaaccccttcgacatcagtatgccggaaccttgtccctcgtgaatagtcaactgaaatactaattgttttgcagatggcggtgcctgtgtcgccatggtgggcaaggactgcgtcgccatcgcctgtgaccttcgtctgggcatgcagtccctgaccatctccaacaacttccccaagatcttcaactacgccccatccacctatctcggcctgactggcctcgcaactgatgtcaacaccgtctccgatctcttccgttacaaggtcaacatgtaccggctgcgcgaggagcgcgacatcgcaccgcagaccctcgccaacctagtgagctcatcgctgtatgagaagcgcttcggtccttacttcgtcagccctgtgctggctggtatcaacccaacaacagggaagccgttcatctgtggctttgacagcattggctgtatcgatttcgccaaggacttcattgtcagcggaacagcaagtgaccagcttttcggtacttgcgagggtctgtgggagcctgatctggtatgtattattggtgtcatcgtacaacttgttgaattcgccttctaacacagtttgtcattacaggcccccgaagacctcttcgagacaatctcacaagccttgcttagcgccgtggaccgagatgctctctccggttggggtgcccaggtttacattatagagaaggacaaggttacccaacgcttattgaagggacgacaggattagatttggggaagtggttgttttgggctttccgttggtttgagggcaaatcccggcgtctacggtcttcactggatgatatgtgccgtgtacggtcatcaatgacgggatagtacaagatcaacgtgagagcggttgatacctgagctgaaggacagttttgttcttttggctccatgtttttcttactcctatcacgataataaaaggccccgttgtcatgtcacggcagtgttccaatttgcatcagaattcaacatatttaccagggaaacggaccaagtccagtcttcgagaatcagtaatcatcccgtctgttcaaaagctttgactgacctttgtctctcttcatagctgcccacctccagtagagaatcccttcgaggatataaagcgaacgagtgagaatatgaccagcacgagctgttggctacaggaaccttttgataccagacaccaacttaggcacttcctaggtcacaaaatggccactattattactccgtttcccaaactgtaggggatatagttggttgttctaattatgtccatagtcgcactccggtgttcctcggtctagaatgctgatattgtacaattttcaaggacgagagctgtatgagcttagttaatttgacgcgatgcgcacattcaaactagaaatatattcccaagagcaggctaactggacggtcaattctagcattcactacatccacgggtacatgagtgcctgacaacatgatattgcctaaataggaaccggccatgggaaataacggaaagtgcttcacattgctcatatgctatgcttggatttctcaatcattttctcaggtcccccacttcatgtcttttatgccgaacatgccttcagaaacagagcacctagagccctctatgccgagcctgcctccagaaatagagcccacaaaggcttctatatcagacctgcctctagagctcatggacgagataattcaactgctccccataaagtgtcaggtctgctttgcactcagctgcaagtctttatatgtacgctatcaaaatgttttggcacaagaggaatttgccttccctacatataactccgacgggggttggcttccatgtggggttttagctaagaattccagccgggaaacaaatttacgccgtcaacttctttgtcgacttcaaggacctagaagactttactgttgctcatgcaccaagttacacctggccaacgagtttgagtcctccgagagggaatacagcactgggataaaccgcaaatgcaagtatcccgggtttgtaaacgtctgtccctgcagtccgttggatattagagcaatggctcgaatgctggaagggtgtcaacatgaatgcatcgaatggcaccgttgctcggtcacaatcgcgcctgaagtggttgccgacgtgaggatctacatttcacaagatgagcagacatatttgcgagtccggagccaatgggagatcgcttacactaaggaatggttcgattacccaaatattgcccgttttttgggctgccctcatcgctctatcgtcccaaatccccagtctctcgtctgtggtatggccaattggacgaatgctttgcgtgcagcctttataggaagggccactggaatgagattggcaaaaaattcggaattgagataacacgaacactcgatgctcgtgagatcttaagaagtgaagtagatgctaagcattcgatgcattgctcttgagatacagtcaattaaagatatatttagaacagtcgaatccatcctttttccgcttctttccgctgtctatatacaacctaagtacctggaaaattccagaagatatttaaaaaacatctaacacgacatccaaaatacctataaaaacgctactattagttgaatggatcatatcgctctcaattaaggccacacacgcggccgacccttgtaaacatacatatagtacggctagtagatctgttctataagatcttagatgtaccgagtaccttccctatcatagataacagccggggaaatcaggtacttggtacccgatggccctctcctgatctagatcccgctgatcctgcagtgcagcctccgtgcgcctccgtgcatctccgcaggattcaagggaaaaaagacacaacacacaaagaggagatcgattgtcaaagggaaattaaagcttcagagaagcctgaaacatctctgctagaaatatcattagctaccagaatctataaagctttaatgacttcttgtttcaggccgtgtctagaccgcccctccccatcgaactaacggaaaatcccctctcccctccttctgagcgtcttctctctttaatatttcatattttagtgaatgtacgttgaagttgtctgatccatccacggtgtctattgttcatacaattgaatgctatggtccttaccaccaccctcggataaacacgagagcccgaacaacgaatcctcgaaccgacgtcactttcactgccacatggactatgcccgacatgcccgagccggatgtctctcacgctgtccaaccgtgtcccacgccattcccctcgtgcaagtcggagtgcatcaccggcgacggactaaatgccgttcatgacgatggagatgtgcaacgcgacttgggaacatggaatgatggtgtccagaccactgccattgaacaattggttgcactcaaaaagtgtctgcgggcagccgacaccgagctgttctggaaacggcttatggaggacatgacgtctataaccaaagcccagtatgggttcgttgctcggagggtgcacggaactgagcccatgccagaattaggcgggcggcgcccgtcggtttttggtgcagctttctactacaatgatggttatcagaaagttgggttgcagcgaaacaattatttcgcgggagggaaccccctattgcacatggaccacgaacggcgttgtttggtccccgagaacctcagctcgctcttatcgttcggcgatgatcaattgccgttcgccgccgatggttatttggcgattcccctcttttcggctggaaagtgcctggcgcacctcgggttgatgtggtcgaaagaaggtctccggcatagaaatctgtcctggtccttcctggagatgattctccactcgctcgaagacctgattatacaacggctggacacaggggaacaaattctagatgaactgttagattccccaacgaaaaatacctccgagttccacaacccccagactgccaccttccatgaagccgctgatttcaactcccatgatttcaactcccaccccctcaaaccctacgcccgaagcttatcccatgagctgaggaccccaatgcagggtgtggtaggcatgcttgatgtcatgcatgctacagtacgcgaggcgatggaggtccaacctcctatcaaatcgggagacatttttcaatcgctcaaggagggaattgaaatggttcaagatagtgcgagacgtgcggttgaagcggctgacaatgtcgttcatgcttacgagctcaacatgcaaattcccaaaaccccactccgggaggagcccgacatactaggcggtctcacagtcccacctgctatacccgagactcggccgagcatcttcatcgaagggaataacatcgctgtaaacccgtacaaacggcggcggagcctaccatcggagctgaacacccgaccagtgcgcaagcaaagactgcgtgcagtttcgtcccggcaagagctttcgccccgcagcgaagaagtcaagaatgctgttcacgaaagcgaccagatcgtacatgctaccccagctcgccagttcgaagctgtattggctaacatggccgatccacgcccgtctctcgcagtccgacgatccgcccctcacctactccttgagggaatcaatgtgaacttaagacgttctgctttgcgatttaccaaattacgagatcttctccgcttggtaatcaacgagtctcttcacgttggtggccgaccggactctgctgttagcaatgcaaccgagtttggcgaacggattgagattcggtcgcggtcctcaaacggtgaattgttcaccaaggttgtggactggtctgtagacccttcattaccggacacccttcttgccgatgaccgtgatttggccaaactaatctcgtgcgtctttctcaacgcgattaaatttaccaacaacggcaccattactgtttgcgcgactattgaccccaagaagaatgatgttcatattcttgtccgcgataccggcccgggaatccccgctgcattcctacccaatctcttcaagccattcgctcggggagatgcatcgaccacaagaagcaaagatggcctgggtctcggtctcctcgtggccaagggcctttcacgcaaaatgggcggtgacttgacctgtgtgcgttcgtcgacttccggtcctatgcgtggtacagaatttcgaattcgaatccccgtcaaccaacgtgaagctgagctccgccctgaaactcccggtgagagtgtttcgacgccatccacctctaccaccgacaaaacacgacagggcagtgccagtagttctctgtctgatacctctccctttaactccccatttatcctactccagaatcgtcagcaacagccgacaccaggcaccatcgacgaaaacatgtctcaaagcccaacactcctgcgaccgtcatcacaaacccttttgaatcgaacacatatttccggcgatgcatatgacaagaagcttggcgagaaatatccgctgcgctttctcgttgctgaggataatcgaattaaccggcgcgtactggtgagcatgctacgcaaacttggctactgcgatgtacttgaagcggccgatggcaaagaagcagtccagatcgtccaaggcattctctccgcgccaaagccccctgtcctagacattgatctcgatccagtaaacgcaatgcaaggcgtcatcaatgagcctcatcagactacaaaaaccagaccgatcgatgtgattttgatggatctttggatgcctgaaatggacggatatgaagccacctcacgaatcctgcagatggtcgagaaccatcgggaccaacatgctgcttttgagcgaccggaccccaagaaccctgattccatggaaatggatccaattcccaactccttatgtacaccaccccctcccacagttcttgctgtgagtgccgatgttagtgacgaggcattgaatcgcgcctccagagtgggaatgaaaggctatatgacgaaaccatataaactctctgacctccaacggctgattctcgaattctgcggcggtactggcaacggcgttgtctaaatcctagtataaccactaggccgcccatccgaacatgatgttgcttccttgcatttccatgcccagacattatacccattgatgcggatatttttcttttcatgtacagaccccacccccaattgctttgttctttagcccaggcgcctctcacgttagggtatgcattgactcggcgacctattcattttcaactgccatataccatccttgtcattttttggccccttttcagctaggggaaataccatgatctagttaatagacgtgtgcgaactagccagccctggagtcgactggtttttgttagggacataagcatgtgatcacatcacgcttgatcataacttctcttcttttcctcttcttctccccattgctagtttcctcgttgaatgaaatctttcttttgaccagaacgtctgcaacaatttgatccaaagccttcaacatttacttaccaaggcttattcagcacgctttttattaagcatctatggatgctcacaaggtatataaaacaagctaacatagtcgtcttatccagaacaatataagtaaccgcattgtttgcatctcggttcgccctggcaacgaccaggaacccttaggtccatactgcaccaatctgctatccggagagaagacctgtgtcagttctccgggcgatcttcagaacttaaccaccattgtggccgctatccatacgggcatcaaaccagaaccatggcttatgattcctcaccctcgtcatgatgcaccccaccgattactcgaacaccagatatcattctcatgacgaaacttcaccgccagtgcatgcaaatccaccatctgcaacgtgacaatcggataaaactcttgcaagatagactccactgcacattaatatactccttaaatccagccccggccacatccttatcacctagacctagcatctatggaagacgcgggccgcttgctccctgggacaccgaaacaacaaagggaatcttttggcgctcgcgacgcggcgcggaagaaggcagtggagggacaatacagactccatggaagccagtgtcacctcaccataagacaagcggaagtgtgttttgtttcatctgaatttgcggcctccactcgggcctagtggcggcgactcatttcctgcatgatttcgtggaaactatcttcgccgtgagtggctttgagaccatcgaagagattggtacgttgggtatctgagaaggtcatgaagtcgtcctcgctggcgttgaggagctggtcttgggtctagcctgggggtagaaggacacaattcgctcttagtgaggtggaatgaggtatattcattctgacaacagcggtcggatgtgggatttttagcgtttatgaatatattcactactacgtttagaaagacgtgtgctccaaggcaataattttcatttctctagatcaagtcgatatcaaccctaatgctttcttcttgcattttctggggagccagcatatgtcatgagttgaaaagacttctggaatataggcctatacatccgtcttttatatgaacctattgtcatattgacataggcagctctactcgcaaagtgtgaaatcgtccaatcctgaatcaggaacagccacgtgagggaggcagaggtcgacattctctcctttaaggtgcttgaagacccgagagtactcggtctatgaagaaattagcaacttccctttccacatggtcctttagggcatccgggagcacaaacctcaatgatgtccacaaactcatcatatacgtgatccgccttcatcttctgacgaacgagatcggtcactccgcccaaaattgcgactaccgtagtgaccttgctgtcccaagtgagaagtgcggaaacccccgttccatcaacacgagtggattcagtgctgccatagatatctggagagttatttcgattagcatcataccaatcaaaccgtcttgatatctaaaaggtgtcactgactctgcattttcttggaaataaccatgttcctccaccaggcgagtccgacagacttgtcaaccaaaattgtcgggaatacactgtacggcgtaatgacgtctagctcctggacagtttggtttgatatggaggggataccagcgtttgagatatagccggttacgtcgccgatggagggatcggtgatgttgttaactgaggcgaacatgccgggcaacttcgtggcgactgagttgcaggtccggactcgctcagcgttcttaaataggcgactaaatgggaaatcgttagtacatgaaagcctatctctgtcttatgcttgaagtctcaccggacaatatcgatgtcatagtagggcatctccatcactttccaggtttcgtggctggagaaccagaatcctgtcttagaattagccactgtcttctcgtctttcctttcatatccacaaacctttttggacagtgataggcccgaaaccgcccattttgtagtccacgctcaccagctggggccttttgatttcccatagcgcctgcttatcggcctttgacagaccaccgaagaattgtagccagaatgtgaaaatctcgccttcgaaagggtcgtccagtaaatctttagtctcgcatagatacgactgatccgggtgattgacagggagggattggtctttaatgtcaatgacggtacagacccggccattgcctttgtaaaagatctgattaacagacaggagattagcgactaatccaaatctaacggggaatcatgagttacataccttagcagcagtagttttagtgtagtccatccaaacctgccatttctgtgcgagttcccgatagcttttattgcctgtattctcaagagcctggatgaaaccatatacagcccatataagttcactatacagatacttattgttagcctagaaaccagaacgagggaaaagaatatacatacccattatctagagaaggcacgcggttgacccaggctgtcactggagttagatcttgagcatccgctgtgacccagggcaagaagccaccgaatcctgggtaagtctcattgaatttgagatacgtctgcaactttttctgcataatagaagccgcgattttaggagcctctgctgtattctcaggcgagaggaaccgagcagcctccggagagccagcaacagcttgggcgtacagcataatttgaagggactattggaatatgagttgagggctttcaaacagtaggaacatgagcacaaacctctttgctggcagcactgaacgtgtgcttggttgttgcctcgccggtcacccaatcgatgttagtgccatcgtaggagataccattgttgctattatatgagatgttgttctgatgaaacttgccctcccaatacagcatatcattgatgaaggcagtaggatctcgaaggacttgcttttgggaatattgatgcgcaaaacgacatgacggctccttggtatgtccggatatcgatggtagagcattgaccaatgttgtccatgttagaacatggccgaatttctcgtggagacgcatgtcaggagctcaaagtaaagagttgaataccgaattagaatgactagccatcgaaacggacatctcgactcatataaatactgtatgcttctgacttgaggcggaaatcgagtatttgccgaatttccatgtccacgaattatatcacatcacgagtctctggggtccccgcattccaagaagcttttcccctgagaaagccttgaatctgataatgggctgagggtgcacgccaccatggtagacgttttcccgtttgtttagctcgtgactatgcgaatctatttccgctataggatgagatcttcaaccgggattcttattggaggtcaattggccgaaggagacggagaatcggggaattatagattgtgtggggaatcgcagaatcttccccagacgccgatcatttactcgattcagacaataggtaggtacggagtaagcgaagtatgtttttatattttgtaattgtaccattaaatctagttagttaatatacattcatttgactcataaaactagctttcataacaaccgtcgtaaagtgtccgacgctttcgagtctaagcgggtcagtatatcaagaagcaccgatagatcgttacgggctcgagccgacagaggggacgcttcatgctgatcgataatctcgagcagacaagctcctatgagcctgatcttttctacctatatggccatcagaacttgctcatttgacaccaggacagcaaaagaaaggcgacttacacatggttcgccattgatctgcaatgcccagaaaggagcatcgcgaatgactcggagaagatcgcgtgcaatgtcagtcttccgtagtagtagcatttcatttggcgcagaaggatagtaattgaactcttcaaatttctgtgtgattaccatctttagacagtgcaacgagacgtaaacgttggctgcttgaatgatatgtagccttgtgagcctagacaggcgttgattgtctttattggcgtttgacatgagctggtcatattgtaaaaaggggggtaagtcatcgagagacgtcacaaacagcacgtaaagatggtcaagtctgtgactttcttctgccgtgggaggttgacgagggagtaaattcccatttttatgactatccaacaatcgcatctctaaaagcaaatcggatgcactttgccaaagccgaatgtttgcattgaatcctgcaatgaaactattttgagtactctcggcatctggaacaccactaccaggtgtcaggattgtttcatcttcaatgccggtcggatagccgatggtgatgccagagttgaatgagtatttgtgtattgtgatcggacgattgttcagaatggctgccgatttatcgccgatataggcaatccagaacgcccgtcgccgaaactccacttcgagagaagtgagcccctgcagtgaatcttcttcgtgcatctgcatcacttgggctaatcgggtggcttccccaaagatgtgccacgacagtcgtggctttccggcagcatgcatgcagttggagtggaagtatcgaatggcaacggagttggcatttgggtattcaagatcggcttccaaatatgtggccaggcaatttctggaggcttggagaaatatgtctgcgatcctttctccctcaggaaatatatccttcggaaggagaaaagccgtttccgcgcagacagcagtgatcaaagtgaaagaaagatcgggccacagctctggatatttgagactattcactccatatatgaggccatcagctctcgaattccttccttgggtcacgaagaaccctaacccatctcgtagactgggttcatgaacaagtggagtcaagggatatagatattcaaagaataactcgaagcaatgattgatagtccgctctaagttcgctgatgtgctctgcacgacaatcacccgttccaaagcatgccatcggtgcaacaccgaggtaattcttgtagaggcgacatcggaaatagacgattgggctgtatgcacggtatcaggggaaagagccggatcaagtatcgggatattggcgtcccatacatctagcggaactgcaaccggggcggtcgaaccgagattttgagttatagagtcatcttccgatacctgcaacgctggtgccaggggactatgcggaacatttggataagccacatcatgcgacctttgtcgcttggatttaggcccacgtctggcgatcggcacgtcaaatgtgcattgcatccgagccaagcggcagttggtgcatattgacgattcacccgagcagtcacactattacaggttagtttagactaggtaaggcgggggtttgcttcatacctttgcttttctccgacggcaacgatcgcatgctctagctgacgagcgcgaacgagatacagggctggccatcatatttttcgtctcggcaaaattcgtcggaggttagggcagttgggaaaatgggaatcgggatgagcctcggtcaaatactccgcgaatttctccgaatgccccaggtttttcttttcttggggtatttccgcgccttgattaattaattaattaattaatatacattgattaacaggggttgaaggtgctttatattagctttgtagaattttaggtcaattgcgtaatatctaacaaaaaaaaaaatctcatctatagtatacccgtctcattgctctatttggattcggaagcgttgccacccatgcgtttatcaaacattcctttcagcaacaatgcggattgcttcggcgtcctttccaatgtgttgtaatcagtgaaggtaacgccgaagcgaaccccgtatccatcggaccattctggaagaaaaattagctcaaaggtcttgaagtatgaaacaagacacgtacctaggttgtccatcaatgaccatgcgaaatatcctttgatatcagagccatcttctgtgcgtgctgttccgaccgcatcgagatgatcttcgaagtatttgattcggtaggtatcgttgacggcctcttcagctgtcatcttgtcttcaccaggacacgggcacccgttttctgtgatatagataggcttgccatatgcacgatatactcgtgtcaagtgcttccggaaaaggctcggggttgacaggagccaatgcacaccacttttctctccgatcaatacaccttgcttgttttcttgtagttcatccacatttcccaagaaatcagtctcagaggcaggctggtcgcgatgccgggcaaattgggaggtgtaatagttcattccgtagaagtctatgtcggcctccctaagcagagaaaagtccgactctgtgaacctaggaagtctctcgccgagttgctctctcatgcattcggggtagtcttgtgctaaactgtcaaaggtgttagttgtgtgcttttgctatctgaaactccgaaaaacctaccaaacggggttcgcaaaccatccgatatggaactgcatccggcgttcagcagcttggtggtcgcgctcatcctcactatcccagggctcgtagtaatcgccattcaaagagattccaatctgcccttgctgagaagctcggaattcccggttatacaaaacgacagcgcgagcgtggctcatgatcaaggctttccccacaatccatggctccgtagtagtatcgccctccgtgcactgcggatttatactgctacgcccgggcgcatttccgccagtagcgtatccctagacacgtgttagatgctatccgaaaggataaaaaagaaaggacaagggactggagaaacatacgaaaatagaagcaatccacggctcattcagtgtgatccagttcttgactcggtccccaaatctctcatagcaaatctgcgcataccgctcaaagtcaagctgtgactcctccacattcaaccaacctccgtatcgatcatgaatgccttgaggaagatcccaatgatagagagtgacccatggtgtgattcccctggcaagcaacgaatcaatgagtttgttatagaacgtgatgcctgcttcgttgactgggtcgtttcttcctcctagcggaatgattcgcgaccaggaaattgagaatcggtatgcttttgcgccgtatctggagagaagatcgaaatcctcctcaaatcggtggtagtggtcgcaagcgatgtcgccattgtctcccttggtccttgttggctcaaggtggcagaaagtatcccagatcgattttccacgcccgtcttcattcacagctccttcgatctgatacgaggctgttgcaaatccccattcgaaatcggggggcaagggtactgacatactggcaaatggcgaacacaaagccacagaagcagtgtgaagtactttgaaaaagaagaaggtgacagagctctacccaagcagaaaattaaagctatattccttatagccggggaattgtggcgttgaagtggagagctcccattgaaggataaacggcaaaattggcatttcgccgattccccgaatctccagacttcacatttttctccacggggtaattccccgcagaaatgcggaatccacgtttctttcagcacgtgaacacctccagggttgtcggaatgcgtagagttcgttgtatccacccggctgtctcttctataagaagtgcaaagaagccttcgggctaagactccctatcattcgatcataggcaagtccacttcatttgtgtcttagtctcaattgaagtctgcaatcatggctcctactgccgctcatgccacagagaacattatctcgtccattgacgtggattctatgccgcctttctggcgacggaagaatggtattctgctatacttcctgctcacttcgtctctactagcaagtgcggctctcggcattgatggggtgagttgtagtgtttcaagactggagtgcgtttcactgacgatctatcacagtccatgacaaacggcatgcaagtcttggattcctggcaagatcgatttggacacccagaaggtgctacattgggtttctttggagcctcgaacgccattggtggtgtcatcccatttatctttctcagctggattagtgataaattcggtcgtcgcctacccactgcgctagggtctgttgtcgtcattgttggtgtgcttgtcgaattctttgccacttctttgaacatgtacattggcggcaagatcgttctaggtgtgggatcttcgctcatccagatgggcgcacctgttttgatcacagagctgtcccaccccaaggaacgtgtacaagtcactactttctacaatacatccatcgttcttggctatgtgattggagcctgggcaacgtatggttgttacaggatcaccagtcagtggtcatggcggctccctactttgatccaagttgctccctcggcctaccaattctgcctcatttggttctgccccgagtctccccgttggttgattgcaaagggtcgtttcgaagaagcccgtaagatcttaatcaagttccatggtgaatgtgaccccaactcggagctggtcgcggtggaatgcgccgaaattcagcaggccatcgacaaagaagcagagaacaacatgagctggaaggacttcttctcctctcgcgccaacctcaagcgcctgttcctctgcttcgccacagccgttttcagtcagagctcaggcaacctgctcgtctcgaattacttgacccagatcttgaaagacacgggcctgaagacccagtccgaaattacacttgtgaacggaatggttactctctggcagtatttcgtcgcgatcttcgttgcactggtcatcgataaattccgccgtcgattcttctttcttaccggttccggtggtgttgttgtcactttcgtcgtgtggacaatcgctgcccagcaatatcttgagcacaactctatagtggccggtcgtgtcgtgattgcctgtatctttttcttccaggcattctacactttcgcgtggaccaatctgattgtcacttattcgctggaagttgtgacacttcagatgcgcgctaaaacatgggcatttgtgctcctgactattcaggtggcctcgatcttcggaagctatgtcaaccctatcggcctcaagaaccttggctggaagttttacatctactactgtgtctgggtgcttgttgtcttcctcgtggtctacttcttcttcgttgagacggccggtcctacgctcgaagaactcgcttatctgtttgagggcgaggatgtcaaacgtggagttgttgacaaggtcgcggtgcaaaaggaacaagtacaatatgaagagcacgtggagaccaagtcggcgtgagataccattgatatgaatgaaccatgacatgacgatcatgcacataacaaatgaagataaaaataattacaaatcaatgatttccatcagaaattcgaagactatgttgaataaacatcaaaagagtagtcgaccgtgtatgaggcctctattcttgatgacgtgagctgtaggaataatactattagaggtacagagtagccctagagacatgcaatatgtccacaggttgaggtcgttggtatgggcaatgtcgtttcctggaagatctacgcaagacaagggaatagaagaaaagatatcattacatccattatcaagatcgacatcttaccacgctccaagcactccgcaccctttttttgctgaaacactggctttgtggcccaacgagttcacaaaggggtctcgagaattcgaaaggccttcgactagaatttaaagatctgccgttcgctaggaaaacagtataacaacacatgtaagcaccaatcatcaatattcacgtaaaccgacgtgcgtgaccacagcagaggtggaaggaagatgcaaggcataagaaacgaggtatgctgtagggaataagacaacgcggcatctaagtcaacttctgcttgatgaagaatgaccgcaggtgtgaaagctgccaggcacatgcggcggacaaaacggcgagctggataagagtccagcgcacgacacgcgagttggtggtctcagactggtcacggaattcagactcacgttcctaggtagaaaaaacattagtatcaccactccaatcacctagagagactctggccatagattggattgggaaatccttacccgctggtatacctgctcacgacggatatcgtgcaatcggctgttcatatccttgacccgctgcacgatatccttgattttgtccttgtcctcaggctcaatcttgctggtctcaccaatggcaaggtcgacagtgaccttgacggcgcccaaagagttggacaaccagccggaggaggcgtccgtttcaggtgtgaagcagattctgtgctggccgggatccgcggcggagaagtggaagcgaccagaatggctatcccgcttggatacgacgcggtggtcattgtcgaaggtctcctcgacagtgatgtgcatcttcaagttatggtcgacggcgtagatgccgctctgggggttcaggacttcagtttcgaaacggcctatttgtgatttaacaacataggttagtttcaaattccttcgtaaagtctctagagatgcgcataccggctactagagtatccttaggcaggtcctcgaagaagcactttgtttgccggccctccatgtagaagtagagggcattagtcggcagaagaagagaaaagaaggataggagagccaaagctgacgccagccatgacgaggatgtcccagagaaaaccatgatgaggagatgggcaattggatagtcgcacggccaagtactcctctccgtgaaggtgtcaacatgggacgtggctcctcaccgcctgccgtctccggaatatctccctttccagcgggaagcctctgtcgatgtgatcttcaatttcgacattcactagtctttattgcatcaaacaaaatctactttcatcttctcgtggtcgcttattaaaatctaatcgctaaatatcgaagaatcactccttggtgtcgtgtctagatcaccacacccaccgccaatatggccgcggccgatgttcgcgacatgctggatttgcccgcagaagggcagcccagaccgcacaagaagcagaaagttgtcgaaaagcgaccaggtaggtgtattgcgctccccgaaaaataagatagattactgacaggctgttgttgaagagggtattacccgtgaattgtacgcgctactgggcgaaagggcgccgccaatcgccattaatgagaacaagtacaagggtcgtccaaaatggatgaacaagttgcgcgttcgaccatggcatgttgaagatggggctctttgtatatccgaatgcacgctgacattgaatcccatataggagcatggccccgttcacgaacaatgcccgttccgacggcctggttttgaaccactggcagcgaaaacacgagtcagcccgaccacctgttcccacacctgcacccgcaccctcagagtcccaaatggaagtggatcagcccaaggaagaagagaaagaggacgtaccgaaactgccggaacaagaatatgcctttgctaagtataacgtcaaaccgcgattgccccgtcggtacacagatgacgagtacaatcgacatcttacaagtgatgactggtcgcgcgaggaaacggactatctggtggacctcgtcactgattacgacattcgatgggtgctgatcgcagatcgttatgactaccaaccacgaatggacacacagccggatgcgaatgcccttgtgcccgcaaagcaccaccggacaatggagcagatgaaagcgcgttactattacatcgctgcaacaatgctttcacttgaacatccaccctcagagatgtccgaggccgagttcgaactacacgaaaagatgctcaagtttgaccccgaccgagagcgtgaccgcaaagaactagccgcccttcagcttaaccgcacagccgacgaggtccgcgaggaggcaatgctactcgaagaattgaagcgcatcacaagcaacgagcagaacttcatcaccgaacgccgggaactctactctcgcctcgaggttcccatcagcgtcggcaacaccacaatgtaccaatccagcgcgggtctttcccagctcctacagactcttctacaagccgacaagagcaagaaacgccgctccatcctcggcgacggtgccatccaaagccccgctggccagactccaaccactgcgggtggcatgggccgagccgatacccccgtcacacaggccgcaaacaagaagggttccatcacatcaagggaaaccaatcaaatggtacgcacgcttaccccagcagaggaagcgaggtacggcgtccagcaccacgagcgtgtctcggcaggcgtgcaattccgcagcgaccgcgcacagcgactcacgcaggccaagtccaacgtgcaaacccagaaactggccaatgctctatccgagctcgagatcccggtgcgcctgttcatgcccaccgaacgcgtctgcaaggatttcgagaaactcattcagtctgtcaacatgctcctcgacgctcgcaaggtgtccgaaaaggtcgaaagtgagatccgtgtactcgaagcctcgaagatggagcgcgagcgcaaattacgagaagctgctggtatctcggggccaagtgctgactccgggcatccccatgtgaaaaaggagaatgaagatggcgacaccggcgttttgggtcactctactgcccaaggtgctcaacaagggggtggtaatcacaagcggtctgctagtgtgcttagtgccgtaagcgacaagagcaacaagcggcagcggagatagatcatttgcttccctactggtgataaaattacacccttattctgagcgtgtgagaactgtaagatgtattagggatcaattacccatattctgtacgattaatgacacccaatttgggaaacatactcataattgacccaaactccatccgcacgagtaacaataacagcagaactcactcagagtccttgataacagtatttttatgcttatccaaccataacactctcgttactcctgtgatgatcgttgccatgcatcttggtcactctgcctccaccactagacttgttcggctcgcccaccggcttccatagaaagccccgggcatcccaatgcactcctgatacgcactagcgagctcctctgccatatcacttctggtagagtttgctcgtcccaggtcactcgatagatgctcctggtactgcactggcgattcatcggatagttcttttggagggagattcgagcgtctcttgctctccctgttcctggaaaacttcagtacccaacgtccactacgggagcgggaaggttctccatttaatctgtctgcactcctgtcattcgacggatcgaagtacacagagggctggtggtttgtctgatccatcgagaagcggcgttcaccaagtggtgaagcatctggggaccgggtacagacatcacgcccatgggttgaattgttgtacttctctggttgtgattgttggcgtgtggaccggctgattttcgcccatcgacttaaaaaggtttcgtcaacgtcttcgacataaaagctgcttccggaatttggcgtctttgcagaagttggtgtcttttccgaagttggcgactcaatgtgctgcgcgcgaatcgagtttacacggccgacagtcattccttcaccagccaagtccactgccagcggtgcgtgtctattacctcgaaccgaatagctcttcattttggcccacatcgatggtgtcaaaacgggttctgccttgacattagtaggactttggttcacaggagactgttggctgtcaggcctcagcctgggagtgtctctgtgatcctcagcattgtccaccaagctatacccatagcccattcgccggcccccggtcatccagccgggactaactttgcgatgtggtccggcaccgttggcgccattggaaataccatgactctggggcgatccccagtttggcgtatcaagttgctcaacaaacttgcttttcagagcctcggtacctggttccagttcatcttcgaccgagcaaatctcagctgccatttgtgtatgaatattgggcaagctatcaattgcatttgcagcatgaactctcagtgattgaacggcagatgctccccgcgaagggtcactgctttggcgcgaataaaaagaggacgcatctcgttgatgagacatagcctggttgtggggctcgagacccatgattgccgttccagacctctcatgaggctgaaagttctcctgtgataccatttgtagcccataccgattcgcacgtggaagttccgacatggatgcattagtcgatggcggctcggaccccatgcttgttcccgcgagtctgtgcgaaaggtctagatcacgatcacccagatgaggtactcgggcctcggcgtgtgtcctgggagaactagttggttgtcgtgttttgcgaaccataatgcccggatcttccctggctagcgatgcggaagatgccgcgcgataatcattagggtttgatcccatgtaatgagcccagtcagccacaagattttgaaggttctcaccgctgctgctgcccataaagccttctcgagatcggagacgaaccaattcttcttgactggcatgaaggcttggaagagattttgtgaatgtgctttgctcccccgatcgctcatttttgaatgaaggcacggactgactccctgtgtgttcggttgcagaggtggggtgagctgagcgccctctcaaacttcctggtggtgtgggtatataatgcatcccaaagggagttcccggggtatcggattgttcatggcctttggcacccgtccacatctccaaatcatttcgctcacgactgcgctctattaggtcctgcaaccccattctgcgatatgccgggcttctgggcgacgctctcatatggggggcatgccgaggactcccaatgcactgggcatcactgtcgtaccctcgcgcgctcatcagactgcttcccatgtccccgaccattgatagccctgtagtccctataggtccatttggctttggcttgagcgagaagggaaagatgggacggttttccccagactgtctggattctctcgagaatcggtgacggagacgcgaaagacttgtggatctccgcctatgactttgcatagaccttgcagttgatcctagtgcaggggctgtggtctctcaagttagccaaatataatatgagatcaagtaatgggctgagccttgcctggggctcgctccctgggaccatccacattctccatttgaccatcttggtatgattgtgcgaagccaatcggagaatcaacacgatgtccccttcggagacgaggacaagcaaggaaaaacatttggacatgggatgtttacaagatgaacttctacgcgctcataaatctctccttgttagctttttggggaaggcactatcgtcagcagatgagccttccattttaagacatcacggggtcgcacttgctgtttgttgatgtcttgggtccatggctcagtctaactcaatgtggttttggctcacaaccttgcgtataaaacccatgttgacatctagtacttacatgatcttctcttcgttcaccatatggagtggatattgttgttattcattacgtactagtgccagaagtgggaccgtacccataagcttgtttttagttttaatatgggcaacagtaggactgtggaatatgtatgtcctcaatgaagatgaagaatgtataaaatctcttctttctcttattctcactggttagcgggcctatcccgtaaaaacagtttcactttctattccaccgaactgtcgaactcggtgattttgccatggacctcgtaagatcaaaaagcctctgctgaggatggaaataatcaccgaacaatagttgcttataccaacagtggaacgtggggagctgctggcactgaattgtgtactttgtaccaaaagtaagggagtttggccatatagtgcatggcccaatcaatgcaatctgctaaccgcccaataacaccgtagatcatttttgcaatagattaatagggacatgaacctccaatccgcctagttatgtatccatcgactcgctgaatcacatagtggggttgtgtaaatcagggaaaatcccgcgggctcagccgcaagacgacaattcgatttctttggactttcccggtttctttctttgatcggatgtcatatatcccacatgttaccccacctcgtgtcacctttgaggctctttatcatttcgatgtcaaccaacttgaagaactcgcgctccttgcgcttgatagtcgcccttgcaattcccttcacattcatttgttatctctactcgtggagacaatcacccatattggtctccagtctcgccgtaccacagtcttccgagacaactacaacctgcacagcgatatcagtgcctctaaaagaaccctcgaataacgacaataatcttactacccccgctgcacgcaattgtacactgccagacaagatctggcattccgccaagcttgatgatatatcagaaactcaacgcggatggaccggcagctggaccagaaaaaatccctctattcgccaagaattattgaccgatcgatccgccgaagcattcgttcgcgctcattacttcaaaacacgaccggatattgtggaagtttatgaagcccttccaattccgatcctacgtgcggatcttttccgttacttggttgttctcgccgaagacggcatttggggcgatttagacacctcgtgcgagaaagaggttgccgagtgggtacccgtagaataccgaaatgagaatatcgatatgattgtcggattggagttcgactttgaatggcgaggaccggggacgggagttgcttcccagttctgcaattgggtatttgttggacggaagaactcgcgcaacctgaaagttattgttgacactgtcatcaataaattgggaggcattgctcaagagaacgctgtgggaatcgaagggattaccctagaaatgctttcggacgtggtcgacgtgacgggacctaagattatgacgatcgcgatcctggagagtctcggacaattactcggtaggaccgtcgatgatcgcgattatgcacacactaagcggcccaagctggttggtgatgttttgatcatgcctggagtctctttcgctgctcttcaaaacgggaacccgatgaatcaaggtgacgctctcgtgacgcatcattacgagggctcgtggaagaaggaagatgcagatgcaaaggagaggaaaaagcagaagcaaggaaaagaacggtagcaagaagggtcatcgtcaccaccactgcctgctacagcctgattagaattatgataataagcgaagagcagcgggttgctttgattttgctttccttgtgtgttgttataactttttcattccccgggatgtaatttttcgctcgaatcctcaagagagagacaggattggagattcaaaggaacatactatgtaattaccatgtggagtatggtctattttcggtttatgctatttaaaatagtatatcaatcaaatgtcgtgttttcccgttctttaatccccgatcaacggaaattcaaacagggacaagattcggggtttgagctgcctattccaacccaaaaagaaatagaagcgcctgtgcacgaactaagtacataatgaaagcgaataacacgagaaacctatcagagtatcaagagaaacaggtgcaaatttactgccaatggtaagagacaaattgaattaaggtactccgtacaaaagaagcaaaatcccgacgacgtagcacgtgatgaagctctaccctagctggattgataaaaatagcttgccaagtcggatcttgccgatctcgggagcagatcactttgctgactggtggagctgtatgtatacattactccacttgagaatcgccaaagcttgactctgccaagagaatatcgagacaaacgcaagaaacgcaacgcatctacctgggtataaaccagactagccttgaaacgttgtccactgcaagtacccaaaggagacactccgggcgctacgaaagcagattaaggtacccgggtcttattatatggttgtacacgagggttcaatacggagtacagtatggacaaagtcaacgagaggattgattccacaattttcaaagcagccgtgccgcgatatgagatcttacgctaaggtgaagggatacaggaagtccttagccaaaggctacgcaactaccgacctaccagattttcgcaacgagttgtctgactatctcaactgtgaagatcagtctactatcgaattatgtggctacagcatgtacgagtggcgtagagacagcacgttcgaggtcttagaatatggatgcaatacggtcaggcctcgcaagttcggcgacatctctgccatctttggacctgagatggaaaatgtctggtgtacatgtactttaaaagtactagcaactacgggcttgtctctgtcagcactcagtcagacttcagctattactaaggcaattcagactgcgactcccagcagtatcaacagcggcagttacacccccgcaaactctccacatgtctatcccaccgtcgataacatgtggttggcaaattccagtcccttaccaccttatccgaacaaagaactgtattcttgcatggtggacagtctttcgtgtatagttagtcaatattgcacgcagatcaatacgtagacttatttaggacagtatgagggagcgacaagagcgcctgaggtggcatttggattccaagaatgcaaccacgggacagtacagtacctacgatgcctgcgccagcaaggaccaattctcctatgtattcgaccgctactatcaaggccagaagaaggatcagtcggcgtgctatttcaagggagcggcgtcaatctagtcttgtagggatccttccggaagttgcagggcacttctcagccaagccgatctagctggaccaaatcaggtcgcaggtccagagggacgggtgccagtacgatgcggccagttactatgttactctgtttttgggtgaccatccacctcttctgttcggtcatggccactagccacatctatagattagccaggtaccgccgtcgttagttgacgatcgcactattgatggagttatctattgacagcagatattaccagagccccattcgtgtgcaagtccaataattgaaacattattggatccaaatcactccagatagctaggtgcagaagtagtggttattttctgagagcatagagtgacagccgcgataatcaacattgtcggacaatccggtgacctgattagtaatcaggtgtccccgccccacgtggggcctaagaccgttacaattttttttacaaaaaattacagatcttcctcacgcccacatcccatcgcactcccctctttgaactatttattccgtttcagacgtcaagtcaaataccgcaaaaatgggcaatgtaaggaggaatccccaagccatacagacgacgccagaccatctgagctctttgtttgggcttatcaacgcagtgaactaacaatactcgatagggagccaaggcaagcatgaagcgcgagcgcaatgcgaaggaccagaagaccgctaagtcgcagactaagagcgtacgtcaagttatctccaacccccatattgtctctccggccgctgacccacatcattgtctagaacgagaaagctatgaacatccagtgccaggtctgcagacagactttcctccagaccaccaaggcgcctgcgtatgtgattccaaaccccagtcctttgcgaatgccttccggtcttgcccgtgtatatggttccttgctaacatgcgtattcgcgcggctatagcctcctcgagcacgcctccaacaagcacagcaagggtcttcccgattgcttccccggtatcagcgcataggaaatcaccccggtggaaccgaaccaatcttctttacgatatcacgggttagcatggctttaggagttttgatgggaagcgaacatatctagcaactggagttgagagtggacactctacgtaggcaactatgtaggtgtaggtggtgagatcataatggggtgtacatgcggtggtgatgtgaaaacccttatgattatagatgcagtcgacgatacatgatctttctctccctccatgctcactaattttcctacagtactaacagatggtggtgaaacttacacttacggggattagatatagtcgtaggcctgcttggcgaagaaaggtcgtagggtgatatcgttttggtatactatactacacattctacaatgaatttatattgattgaaattatcaattatcaaaggtctaaactgacaagtatctaccagacccagacccaacacaggattatgattagattgtgatatcaacttagcaacattattgagaactctacgagtatcgtactatcaagccatattcacatgaaacataccaagtgacatggtgcactgatgatggtgtgtgcctctctcagatcactctcagatcagctctaccatggaccttgccatttcgagtttctcagttggaacaatttccatttcgaccagcttgctgatgatacgtacagcccacccttggcagttctccgtgacagattgcctgttggccgctcgaggggggggctcttgctctgtttcaccagttcttcctgttcctctgtcacactggccagatgatagatgttcagaaaggaggcggagtggacaatattaatagggtcatccgaaggtagatatgtcatcaattctgcatctcccgtgacctgatacaccatgccaggttcgttctcagtggcgacaaagagtgaccaatgcagaggttccccttcaccttgttcctcatgaaccagagagattgttttggagggtgggggagagtggaggaggtgtctgagacctcttggaattaattttttgctcgatccattcatccctaagaccaatgatgcgtatgggagagtctgaagttggatagccactcatttctaggtgacataagcatcaggggttttcgtacaatgagctaaacaatttcagtattcactaacgaacgagcgtctcttgtcgcaatggtccagggtagagatatttgaacattgtattatctaactgtaaaaccaccatcaactctaatatccgcaccattgatcatgccgctggaatcctaatgtaaaagtcagaaccagagatatagcccactaaggaggaaaaatacctgacaaagaaacaacacagaatcagcaacctcctccggaagcacaaacttgcccgtcggtatattcgccaagaaggcctctttaacagtcgcctccccccaagccttcctcccaagatccgtccacgccacagtcggagacacagtgttagccgtgataccccgaccaccccactcagaggccatactgcgcgtcagacctaggagcccagctttcgaagcacaatacgcgccatgccgatgcagcgcgacatgtgccgcctgtgatgaaatgctgacaatccttcccggtggcgggggattaggcgatgattcggcggccttggatgcggcaaaatagagtcgagcaaatgcctgagagcagagcatcgggccgtagaggttagtggtgagatgcttcagcgtttcttccggggatgttatctccatgtcgctaagagatacgtatccagccgtgttgataaggatacttgggaacgctctgttagatggagagcgcgaggttgggtcgattatttgtttttctaaggagttgaaggccgcctgcacagagtctggtgaggtgatgtcgcattcataggtgtggatgttatctaggtcgccgctcgcgccgtaccgggattcgagaagctcatcgcggcgtgcagcttcgaaaggtgcgtagagaatggcgagatgggcaccttgttgtctcagcttttgccctatgcttgatccaaggccgcctgtggagaagttaggtttcgttgagtctggctttgtgtctcgtgtccctacccaggccgccaggtatgatggctaatctgcgggcaaatgccattttgtacgattatatttgaatagttgcaaaatgccaacaggaactggcacctgacacggtgtatgaacttcaaaccgggcattctccgctgaggggaagttgaacgctttcggaaatgatcgtccagtcttcacttgatgtcactttgtgttgaaaggctgaaagatacagagtagttagagaagcttttgttatttacgttgataaatacaagttaatgagggataattggactagaagctcatcgtttcggactaacaaaccgtcaggttcaagtcccactaacaaagatcatatttacctctctttcttctcccctgcatgaatatcaacatcatccaagacggcctgattctctttcgccgccgcaagtcgaatcctctttagcttcctcgtatcaacatccacccgccaagtaaaagcccaagtaatgaggttcataatgatcgccatgccaacaaatcccatcgcaatcccaaaggaggtcgtatatcgtggtgcgaacctagaattgaacagctgagaccccacagcccctccaatctggccataactattcgcaaatgcgattgcaaaagcagatcccgttgcgccctcggtggtctggactcgccagggccacatcattgtatacctggtttgtcttagcatgaagtattgatataatatagaatgttaccagtcggactcaccaagcagtcgagaaacctcccgctataatcgtcgcggcatatacaccaccgttgttggggaaggcatatagcacgccataacacgccagaatgacaatcatgaatccaagcgggatggctggctgaggaatacgcccggtatctgcgaagataccgaacacgattgtcaatattactgcgaagaccgcagatgggatgtttagtagctgggtttcacccatggagctttgacatttgttagcaaataccccgagcgcttaaagctggggcaactcacgtaaatccaagattggcaatgacggtgggttggtagaatgtgagtcccgtcgtcccgatagtaaagaaggcccaacagaagaggaaaagccagattcgcttgttcttcaacgtcgtgataagttcgcgcagattaaagttagactccgccgctcgaggggagttgcttggtaggcgggcttgtgtgaaggccttttctttttcggatacccaagatgcagttgaagggactgtggagtggttagttatgtctggcactgaaggttggatgacctacagtcaggtaggaagaaataagtaaatattcccagtaagactgtgaatatcccttcggttaaaataagccttagaagcatcattagcatatgatcaatctgtttgagaagctattgaaataccatttccatcctgatagaccaccagcaacggcaccattaaaagcaaatgcaaggacaccactgatcacagtgctaaagtttccaaggagagtcacaagaactatccttggggcaacctcatcgggtctataccaataacataactgcaagagcattcctggccataggccagcctcgaatagtccgagaaagaatcggacggcatatagaccctgtctgtttgacacagcggcatgacagcagagaacgataccccaagatatctgtaattgtcagtgccaaaccaatcagaggtgtaataattcaacgtaccataatccttgcttgccaaatcgaaggtcgcacacctttcagtaaaaggttggacggggcttctgcgataatgtaagggacctccagggtattagtacaacttcaggaatgacgcttttgattcgagatctctcacataatacatagtcgtgaccagattatactggtctgaagtcattttcaattcagtcaggatgttatgcggtgtgcctttatccataatccgggcgtatgagacctaaaacattctggtcagtgatctcccaccaccgtactccgtagatgatcttacgttggtaaaatccacacttttcaacatatacataacagccaacaatggaatcagatgccaatcaatgcgtcgtaaaagcttcttttcttccgcgctactgagcgtcgcacgcgctcgcatcagggtggcatcataaccgggaatgagctcttcttcaaaagactccggagtgtgctctccattgcggttgacatagtgtacatttcctttcgccggtatcggtatttcgtctgcggagacaaccccagtttggcctttctctgctatctcagaagacatagtgatcaccaatcagtgtcttttgtagttggcgcacggaggcaaggtactgctggagcaattgcaacgatccagaaagggtatccagaccattaaatggactctattagtatcatatttgctctactccgcaatctcgagcaccaaaagttggttatctcctgcgtgaattgcgcaagatgagcaaagaccactcggcatggcgtgcaaggattagttacctagcgtcttatactagttaagctggggaatctttgccgatagcatagatataatccctgccgtgcgctaaggacccctcagattggaaagccgaatgtgagctatagtccattgttggtctagacagttgaaacaatctgtgaagatgatctcccaggagccaacacctagagttgttccctagtatgtagcgcactttcgtcaatcaaccttgacttttgtcttcctgatatcaatgtcatagatttgatttatatagcacctattagaatacaaacaaataatgctttgaaatcgacagagcacgcgataataagtcatgcttggcaaattcatggctttaaactagtaaagtgaatttgccgagcaaagataatgcatctcgctacattcagtaaaaaagtacgaagtaacgaaaagaagcaaatacttcagggctacgagtatacgccattgcggggagagaattcctaatcggcccctctcacagcacttcatcttttcctgagagtcaatcacattcctctccagtccctaatctttatcagacttcaatgggccgagaaacatgaagaattacctgtacttttacgccgcatctctagcaagagtagcgctggcatcggaatcccaacaacccttgattggagaagtgatcgacaagaacctgcaatctccaactgtgaatttagaaagaattatcgacgaatctcctctcttatcattccacagagacattgtgcaaattccgtcaaccagcgaggatgagaaaagcgttgggaatttcctcttggacttcctccgctcccacaacctaaccgtcgagaaacaaattatccctccggggagtgccgccgagcaagaaagattcaatctttacgcctacaccgggagagacaggtttccagagctgctgctgaccagccacatcgatactgtcccacccttcattccttactctctgcatccaccagcctcagacaaaacaggggacctgacattcaatcgatcagacctgattatcgctgggcgcggcacggtggatgccaaagccagcgtcgcagccatactatttgctacactggaaacactagatgccaacccggatgcctcaatcgggttattgttcgacgtcggcgaggagaaaagcggcgttggaatgaaacatttctcaaactccggtctcaacccagcaccgcctaaattccacacagtcatattcggagagccgacagagctcaagcttgtcgcgggccataaaggcactctcgggtttaaggtcgtcgctgaaggaaaagccgcgcattcgggatacccgtggctcggggaaagcgcggtctcctcgattcttcctgttttatcttacctcgataccctgcaagatgtcccgcctgagaaaggtggacttcttcgtagtgagaagtttggtcaatcgaccttgaacattggggttgtgcgcgctggtttggctggtaatgtcgttccggcatatgccgaggcaacgatttctgtccgtcttgccgctggaaatccggatgacacgcgagagattgtgcggaaggcggtcgaatatgtgactggtggtgatggaagcgtctatcttgactttggggatgtcgagaacggcgctccgccccaatatcttgattttgacgtcgacgggtttgatgtgattactgtgaactacgggactgatattccttccttgaagatcgatactcaaggaggtccaaaagtgaagcggtatctctacggaccgggtagtattcatgttgcccatggcgatgacgaggcaatcaccgtgggagagcttgaagaggcggtgcaaggatacaaaaggttgatcttggctgcactggttgcccactagatataggccttttttggcttgagagatagatgaatgcagcatgctacagctatgatactctacgctctcatatctacgagtctacaagcggtttgctggtgggatcgcaagacatcgaacccgaaatcgaggaagcccggtagccacgacggccatcgactggactgtaacactcgagctccctgcaactgaggcccatgcagtggggcccaatccccgctggtgctggcaggacatagaagtgagtgatgaaagcaagttcgtcacaaacaccacttcacatatgcctcgggtgcaacgagaattcagcccagcccaacataggaatggccgggcaccgagcccatcagtagcaaaccgcggatctacacccgagacgggcagtcagcagcatctgcctggagataaaatcttcaaggcacgacaccaaagaggaaaaaaagagggatgaagcatgcatgtcctttcgctggtattgtccagatcaagttttaacggtaatatctcagatcgaggctcgcgcttttggaagaccaaaaacgcaagacctcgaacacccgtcatgcgtgctatagaaaacacacttaccaaaagcatccttatagagatgccagttcaccaccttttttgttctcatcctgtagtcccgatgactatcagcgaaagggaagctgccgtagaactcctaattcaagcgccagtcgtatcggccgagatattcgtcttctcctcacgtccaatggagtgctctgtctcggtatctgtgtcaacaactttgatatgcccgaaccaattatcattggacttgcgccaccactcggcgatcgcgatgatagtgacaccgcccataatcacaatcgcgtagttgaacaaggtcgaatcctggtcaattgctttgtccgagtaagccggggcgcagagaacagcgaaagcaaatccgttccacatgaatgtaacaacagcagcgataacgctaaaccaacccaaatcccaaaagcctggacggaacgatttacgcgtgataaacgctcggcccattccaaccaacccgtatgctgctagggaacccgcagccgaagtggagaccaagctggagaaggccacttgcgacgggagctgagtgcataggagaagcgcggcaataacggaaatgaagatcacagagttgtgaggctgcttcgacttcgacacacgcgatagcacgtcgctgaatgggaagacgccatcgcgtgccacggcgaatacaagtcgcgatacagcaaccaaagagatcgaagtattgagaattgctccgatcatcgcgacaatagtcatcacaacgtgcgcatggggaccgagcgccatcgcgtacatgttgatgaacggctgaggtgcggtagtgtcatagaatgtgtcaatcggaggcatgcagaagaggaacaagatgatgatcgggaagccgcacagcgcagacgcaacggttgcccagaagataccctttgcggcggctttcttagcggacacggtctcttcggcgacatgacccgaagcatcctgtcccacgagacaactggcgaccaagtaccaggacagaacccagttcaatccggggctggtatccccgccattgtatgtagacgtaaacacgtattcggctgactggaagccgtacgtcttagagacgccgatgggaagccagatgaagttgagcagcatatcgatgataatgatcgtcacacccgttctgaacacccacgagtacatgcgcgggggcaagaaatttagcgaggtagccatggccaggaaaataagcgagatagcccatgccacggcacgcgctcggacgtcggccgtgtcgtatgggaagctcgtcttcgggttgaacacgacaacctcggaaatcaggtaattggcgacaccgaacgaatcactcgcgaggaaggcagtccacgcaaccaatgtccatgcggcaacgaggaaggagatgaagcggccgacttgaccgcctccccaggatcgaaaggcccagtagtaaattgaccccgcggctggatagcttgaacaagcttcagcgagacaggcggccgtgacgatggacagaatactaccggagacccaggagctccacctaaggaagttgttagtgatgtgatcaatgcgaaaaagcgcggggaacagcgcggaaagtagaacatacatggcagccggcccgcctccactgagggcgatatagaaaagcacacgaattcctccaacacaattcaaggctgagaaggagcaggcgaaattgtcgaacgagccccagcctcgagccaagacagagcgatagccaagctttaggaggtcgcgatcatcttcattggtcacggaaactccatcggagttctgggcctgatgttcgctgttctggacatcttgcggggagttaggtgcattgagggcaacaacgtcagggaaggtcatgatggctgctcttgtttttttgtcttttgagaggcttggcacttgacaatcgctttcttttttttcccaaagaaaaaagttctaattcaattaactttttccgatccctatatcacgtgggccgatcaatggaccccgacaccggggtttgttcaagggtcttctgagccattattgatttgaagatggaatattaaagcatcatgaggaattgactagaaatgctacttcataggtagtgaagctgccaattgatagtatgttgttaactatcagcttggctgttgtccgggtgaaggggcggggtcaattattgacagcgtgtcacgcatagtggttgtaccgtactccctataagtatactttggttgaccgctcattaatccatacaataaatagcatacatacaagacccttgctgaaaaagaaaggaaagcacttcattggcaattattaatagtcgtaaacaacttgcagccctagagaggtcttatcgtttcaatggcgtgatcatccataggcggaccgatcacggagatcatcaggtattgataccatgcgaggactgaaaataacagtaaattacacaatatcccacacgatccggtcagaaaccctggatcccaggtacacagaagtactgtaccatgtatcataccgtattgatgcccctccaactttcaggtggatcaatcccccattgggattagcgtttatttcctccccctccatatttctttcaccatttctcaaacatttttccttctcttccctcactctctctctcaaaggcatcggatttgtgaaaattctatccttgagacctttttcttcttttccccctttttttttatacacatccgtcagaatggttcaatcgtatgttggctcgactccttgtgaacagtggccgacacagttgctgactatctgaatagatctgttctgggtttcccccgcatgggaagactccgtgacctcaagaaggccaccgaggcttactggtctgacaagatctcccgcgatgagctcctcgctgagggcaagcgtcttcgtctggagcactggaagatccagaaggatgccggtgtcgatattattcccagcaacgacttcgccttctacgatcaggtcctcgaccaccaccagctcttcggaaccatccccgagcgttacaccaagtacaacctcaaccctctcgatgagtacttcgccatgggccgtggtctccagaaggagggcattgatgtccccagtctagtatgtgcaaatcattgcatctggtgtctgaattcaatgctgacttaatcaacaggaaatggtcaagtggttcgactctaactaccactacgtgaagcccactctccaggacaaccaggaattcaagctcgctgccgagcctaagcccattgctgagttccttgaggccaaggccgccggcatcatcacccgccccgtcctcctcggtcccgtctccttcttgactctgggcaaggccgaccgtggccagagcgttgaccccatcactctgattgacaagctcgttcctctctacattgatcttctgacccagctcaaggctgctggcgtcgaggatgtccagattgatgagcccgtcctggtcttcgaccttgccgagaagtccaaggctgccttcaagccagtctacgagaagctcggtgccctcggtgcccaggctccccgtatcaccctcgccacctacttcggtgacatcgtccacaacattgacgtcctcgccaacctccagagcctccactccattcacattgacttggtccgcaaccccgagcagctcgacgccgtcgtcgccgctctcggtcctaagcagatcctctccgccggtgttgtcgatggccgtaacatctggaagaccaacttcaaggccgccattgagaaggtcgagaacgctattcagaagctcggcaaggaccgtgtcattgttgccacctccagctccctccttcacgttccccacactctcgccagcgagaagaaccttgatgccgagatccgcgactggttctccttcgctgttgagaaggccaccgaggttgtcgtcatcgccaaggctgtcagcgacggccctgccgctgtccgtgagcagctcgaggccaacgccaagtctgttcaggctcgcgcttcttctgcccgcaccaacgaccccgctgtcaaggcccgccaggccgctgtcacccctgagatgcacaaccgcaagtctgccttccccgagcgttacgccgagcagactaagaccctcaagctccctcttttccccaccaccaccattggttccttccctcagaccaaggagatccgcatccagcgtaacaagttcaccaagggtgagatcactcctgaggagtacgagaagttcatcgagaaggagatccagctggtcgtcaaggtccaggaggagctcgatctcgatgtcttcgtccacggtgagcccgagcgtaacgacatggtgcagtacttcggtgagcgcctcactggttacgttttcaccacccacgcctgggttcagtcttacggctcccgctgcgtgcgtcctcctatcatcgtcggtgatatctcccgcccggctcctatgaccgtcaaggagtcgaagtacgccgcttccatctcccccaagcccatgaagggtatgctcactggtcccatcacttgtttgcgttggtctttcccccgtgacgatgtccaccagtccgtccaggctcagcagctcgctctcgctctccgcgacgaggttgttgaccttgaggccgctggcatcgctgtgatccaggtcgacgagcccgctctccgtgagggtcttcctctccgctctggtgacgcccgtgttgcctacctcaagtgggctgttgactccttcaagctgtccactgctggtgtctccgatggcactcagatccactctcacttctgctactccgagttccaggacttcttccacgccatcgccgctctcgatgccgatgtcctgtccattgagaacagcaagtctgatgctaagctcctcaaggtcttcatcgacgaggcctaccctcgtcacattggccccggtgtttacgacatccactctcctcgtatccccaccgagcaggagatcaaggaccgcatcgaggagatgctggtctacctcactcctgaacagctttggctcaaccctgattggtttgtgatcctggcgcgatatctaattttctttttcttcatgctaatatcctttttttacagtggtctcaagactcgtgcctggcccgagactaaggcggctctcactgcggtaagaaatggcaatagtcttgaaaacaatgttcaaatgctgataaacacacagatggtcaacgctgccaagtacttccgccagaaatacgcgaaataaattatttcaatttgccattaatttaatgaggaggcgacaatcaacctgtcgcctcagtactggggagttttctttattgatgagttacgacgatgataccaaaagttcaacatatgggtttcaacgggttttctagaggataccaaaagcgggcctggagtttcaacattactgactattttaaactggcgctagccaacattacagcctactttcgttgtggtgttcggttgatgctagttttaccatttcaacattgtgtggttttccacatacagcaagctctacaaccttgcttgatcaagttcgcctcgtgggatttgatctactgcctctatcatagtatagaatcagttgtcaatattacaattaacaatactctgtgtttcttgtagttctgtgtagcctcagtaggtttagttgatagcacctctgccgtggaaatccggtgcataaagccgttgatttgatttctgcaacccatgttcgccgctcctcgttatacctgggacgtttaacttgactagcattgcacgctaacactatatgataaaatacccataggataattttccattgtccttggtataattttccttcggtcggtagcggttgcacagtcattctaatcttgactacagctgctcgtcaaccatatcagcacggaagaaagagcagataatgtaagatctgtcccatcaactcaagtatactgctttgctattcgcattagattgccagactcggcctcaaccaagaaatccgccagtccaatgcgggagttagtacggagaatatcctgtatccataaacaaaagacgagcagattgtgaacacagcgctgatggtatatagagaggacgatatgaggtgttcgtggccgtcgctaaatatgacggggggaatgtcaaacctcaaccacgaacccttcaagttatcctttttaactatgcaccaatttggtggaatatacacactggatgaatactctcagcgctgtattcacgatttattgtcttttgttggaggatctagaatggttgccaacccaggtatcctgcttcactatcagtatcagattgcatggcccatgtgcccccggacgttgaatagtacaacaacaacaagtatcagattattagaagaatcggttccaggtcatggataaacccactagtccaatgcgaaatttggtaaagcttctatatcctccaacaaaggacgagaaggtagcaaatccagcgctggtagcatatatcgaggacgacatgacgtgctcgtggggcagccatttcgagaggttgctacgacccgctccaaaaatatatgaagccatgtcttgagctatccagcaccatagcagatcgcacttcgtgactgcaattttcttgattgcccaaatatttagcaatcaagaataaggatggatttcaaaccacagtacaataaagctgccagtctaactaacaaatacgtgtaattccgatcaaggaaccagacgccgttaccaacgccagcgcaattcaccctaaacaacttcaagaatcaatattcccctttgtttacttggaagcggtctccccgggatttgatgactcacctgccctcccattagcaacgagttttgacgtcagaagagccgaagcaacttgagaggctcgcgggtcgcaatttcgaaccgctaaataaccgtgtcccaagatatgtgacgcaaatttctgtcgccttcgtgaaacgggctaagcgtttattcggcgggtgccccgggactctggcgactagtaactgatcgagatctcgaggtagtttgaagcgcgtacactacttgagaatgtcgcatatgaatcaagagagcaggccaagcccttgaatataccgaaataaagggactcccatcctcgtcattcgacaggggagcttaccgcaacacttctatatacataattcaagacgattgctttctagtcctacgaggagacctagggagtaggccacttgtctcctgtggagtcacagccacagctgtaggatatgtaacccttctattccgaccttgcctgggacttccagtccctcggtccttgagcctggtactatagcgaacctggagagaacccttcgtcctccctggaaaatgtttcacgatccgtttccacgggagacttcgcttttccttcagttcgatcaaaagttcgtcctcatcgggcaggaaacgagtcgcacgcgctggttgctttttgctgcaaggttaagctgggtttcaataccagaacagtttggcgactctgtggagggaccattgccgttcttcggactgtgaaacccagtgaggttcgactgtagccaaacgaactttgtgaaacagggcacaggagaataatgagtattggaagtcgactctatagaggaagtgccaaagggaagaagacactatctgagaataagacctagtacttggcaaaatgtttgactgatatttgacaaagactaataattcttgcaactcaaaccggggaatagcagtccaccgtttgcctgcagcgaggtggaccgtatcggtgtcttgacacatcttcttcagtgcctttactcttgccacccgcggcttgaactgtctcgcctggtacgcctctgtgtaaagaatagctgctcgcataggaaatatatccagaatgatgagaagttgcagccttgcggcccttaaggcatatacaatagcgtacctggagggagccttccgaccttctaggaaaatacgttgcaattcgcttctatagcaatctccgctcttccttcaattcaatcaaaagctggttgtccttagacaggattccggttagcccagtcgctttcctagagtaggatcctttctggcggggttgcttataattctagctgccaattttatttttataatatgatatagctttacctaatctctgcgagtaggaatgctctgcctactcttcaaaggtaactaaatagatgatccttaacaaaagtatctcccgtgtaagaaaccacgaataggaatcgtttcgatatcgtgcaaacttattagggaagtccgatccgcgactactagggatgctgacaggctctccgcatcacaacgctatagcccgtcttcgtcgtcatgagctacagccctgtctttctcctggctattaaccacatagctttcggaaacaggctgttattatacttcttggctggcatgctttccccgataatataagctaccggttctaattgtaactcgtctaccttaattctagtatctccaggtaataaatgcgttagagttgattacttttcctagcccatagggttaagaatatagccatttactattatattaccgtctactatatctattatcgggttcgaatatagcaaaatgtctccatctattatagcttcatctacattctaccatatgagccagaggactaggtaacctagctgactgagagagcactaacctatattttcatatacttctgttcggcttagaaattcttcctctgccactaggatgtagaggccaccacgtaccattatgatactagccggataaaccctgccctaaagcactgctagaaatatcatccggcaattctcgactcgccgtatatatattcgatacagcaacgtttgcatttcttcccgaggaggcattcaagaaattcaaactcattcgagcagtcaatggtcacttcttccgtaagctcgttgggggctaataacgtctcgacctcactagatgcataggactgactttgaaggtaatatctcctatttcaacggcaagctctgtgacgatctgagaggatcgtacttgcctaacggggcaggagcggtcacgtccttgtacttgccgcaggaacgactatgccctcgcaccttcccaaaagaacgaacgagaattaagcgagacaaacgcaagagtataagaagggaagaacacgcacttagatagtttctctttttcctttcttcctcgtacttagaatttgattggaattgcactcttttcttttgaatcgaattggctcgtaacaagctctacaatttccccgaggaacctctatcggattcaggactcttgcagaatggtatctcagctcgccaataacgataggggtacgtcctcggtcggattttgttgttctttctttgttctttctttgttctcttttttgggtagcgaaggcattggattatttgtacacactaactaaattgatcttattattggtagtctttttagacctcttggccatcgtttattcttatctttcccttctcgctttgatagctaaaaggcgagaaaaagggtcaacagtacagacgcctttcctatgtataaccaaggaacagttacaatttatagataggaatagcattaagtcacggtagaattacccttaaaacaccccgaggaaatagaatttacaatccaatatgaattaaaccagtaattgaactagtagcgctagtcaattgcagaatgtcgagcaaatagccgaatctatccaaaaagtcttggcacgacgctcctgacgtgactgcgagatgctcagcacgtgaatctcgttgaacccttacagccaatctccccgcgatcgctcacttttgattcaacatttctccaatatggtaccccgcccggatctcagggaattgaaacaaaccgttctcagagcacccaaggatcgaaccctgcggtttagagaagatggaacatttcacattggagtctttgaggatttgcatttcgccgagggtatgtgttgataattgatgagaaatggtcttttgttaaccccttgcagacgacgaaaaagacaacaagtccaaaaaagtgatgtcaacgatcctctcgaaggaggacatcgacttcgtagtcataaacggcgacctagtctccggcgaaagaacccaaaaagccgattcaaaaaaatatatcgactcggtagtttccccgcttgtcgaaaagggatacagctgggcatcaacctacggcaaccacgatagcgaggttaatctcaacccggaggatgacatgctcgaggaggagaacaaatacaccaacagtttgacgcagagtatgatctccggcgacaaggccggaataacaaattattacctgccggtgttctcacatggacagacgaataccagcacgccgacgctgctgctgtggttcttcgattcgaagggtgggcattattaccagaagcaaggagagaccgggcctgctgttaaaaggccgagttggattgatgattcggtacgaaagcccctatattggttcgggaaatgactgactggctgcattcaaggtcgttgaatggtttacgaaaaccaattccgaactgaacaagaagtatggcaaagccattccctcgctagcattctatcacatccctgcgcacgcgatgctggaacaccaacaaacaaaaggcataaatccgcacctgaatcccggcgtgaatctcgagcgcgtgaacccgcaaggaaccggcgaatggacttatgacggccaggacgtcaagttcatggacgcgctccttcacaccgaaggcttaatcgcgggatttagcggccacgatcaccaaaatgactggtatgtgtctaacaggcagataatagtgacttgaatgattcaaacgctaaatctcgcaggtgctttaaatggaatggatctcttgtcgatcacgatctaaccgggaatggtatcaatatgtgctacgggcggcatacggggtatggcggctatggaaatctggcccgcggtggacggcagatcttactccacgaggataatctcgcaaacgacaccgagacgtggattcgacttgaagatgggtccgcccaggctcatgtcacgctaaacacaacttacggccaggatacttatcctgctgttactaacggtgctgggaagcccgattcgcttccttgttcttggctgtgggttccgcttatgatgttctcgcggtggaagatgtaataagtgggttcttttggctataggtcttagattgctatattacttttggacctgatttatgaatgtcttgaatattttgaggatagaataattttcttgtcttcccgagtattttagtcacttctcggcctaaatggattatatacaattctatcttctgtacaatatgacttcctccactcccattcttgccatcttccagccaatccgcagtccaggggtctgagtatatacagccaataacgaccacctacaggtagatgtagcagaaaggaccagagacagtgctcatgagatcgcgcatagcaatatccgagccaccagcataaccaatgttaatgagggtgtcaagggtagtgttcggcgaagccgggctattcaagaaagtaccggtgccagaaatagcattcagacgattgtgcaggtccaagttctgccagatccaccaggtgcgatcaatcataccgtggtggagccagaaagcagggtcaccggggctgacgaagacatcacgggcaggatcaccgcccatggagtagtgaccgccaccgtggacgccgatgttgccgctgccggggacaccctgcatgttcatctggaagtcgtagatgtcgttgtggcgcaggatcaggtccacgaccgcggtgaagttagcgtagtcctggatgatcttggtggtcagatcgcgcttcaggcagcgagggttgtaggcgaaggggttctcgctggtttggctgccgccgccggggagcatcagggtgacggggcccaggttgacggtgtagtctttgaaggggccgctggtcacgcagccgccgccgttgccggtgggcaggtagatgatcgggtagtcgcccaagctcagctggatgtcgccggcggacgcgacggtggcgccgtttccggacatcgaggtgtcgctgccgtcgaagacttgggatgtctccaggttgccggcgtcggcggcccagttccagtagctgtggttatgttagatattggtaattttttttattttttattatgtgatgcgattgacttacgggtagtcgccggtgtagccacactcgttgcgcatggcttcctcgaagttgtagatgaagtaccggtgccacgcgaggaaggttcccgtgaagtgaatctccagagtctggttgatgtgggttgcgacgaagtcatcgtaacgggaccgcgcaccagggacctccgcggaaggagtcaaagaaggcaacttctgcaggcaaaggatggagctgatgtaggacttcttttgggtgctagagaaagtcctccaatcgcgacgaatgcgcagattgctcaaggaacaagtaccgcgcttggtaatgtccgagtcgctcgagacagtatcgatggtggtgttgtatgccaacccagccaagtcctcaagctgggactcagcgaccggcagggaggtggaagcagcggtgggagtcgcgctcgcaacagcactgtccacggcagtggggatagcccacgcctgcgcgaacaaagctcccagagtgagaatggagatggcaaccatggtggcgagttgacaagagcttgggagaagtgttgagccagaaggaatccgggcatgcttgttgatttaatagcttcatcgcccctatcttcgacgtccgagtctaactcgaagcatgcgcttcttgcataaaatccgcgggggtccataatctcccctcttctgctgggaccatttagggcaccgggccatacgttccgctttctccaccgggagacgccggcaatttgctatcgcactttttcccttaaactcagggttttcggtctattcagggatcctcttccctgcaaaaaaccgtcgggtcacttacggaccgagccttttagactctggggatcccatcaactccatatagggacgtatgacgagaaacgcatattactacaataaatctgaagcaaataggaatcagccaccacgtggtccccttgtcgcttggcaatttcagctaagcgacaatccctgtggccgtctagaccctggaagaatccaatttattgaatttggccaatttaacaacgtggtcgctttgggaaattaatcaaaatccagccaatctcggagtcacgcccctcctagtgccctagctgcggccaagtccgtaaactccgactgcaagctacctatgcaacccttcccagtacatccgaggggctcatctccttgcttttcttaccgatgatgctccgcctgctcattggccatgtttcgaatgacgaactacaacccggctgccgggtctgaggcgtattctggaaacctcttccattggagggaatgcattgtttccatgcaggcgtcgaactttcacggaacacagataatggcatttgcgttttcgtttttattatgtccgacgtcgcttgtgaaccgctcaaaggagactgttgacccgaagttgaagaacaagatgaaaccagatgattggcctgtggtgcttaatcgaagtagaatagatgaaaaaagcccctccatacgagactcacgccaccttcctcttggcttcggggaccacagtgataacttggtagagctgactgtaatgcgaaacctatgatacggtgtacggggttctatgtattaaatctataacctttgggatgaccctgtcaatttggccccgagtataatccctgtctgacttctcctctcgatgtctccttcataactttttacgactagccatgtcggacggtccgcatagcagggatgtgaatcccccagatctcaatcaaggaccgaaaattatcatagccacggctatcactactttcgccgcgttattcaccgtttcggccaggttctacgtgcgcatattccttattcgcaatgtcggctgggatgactatacgatggccctgaccatgctgctgtctctctgcgggttcgccattatcgtccccgaggtgatatacggtgcaggcaggcatatgatctatgttcaagaaacgtctgtaaaggcaatgcatttgaattatgctacccagggcatttacatgtgggcaattggcctggtgaaggtatcaattgggctttttttgcttcgtttcgcaccccgaaaaggatacaaggtctttatctgggtggtcattggtgtgtaaaggctttatatcttcttctgcgtcttactgacgagcccggcgcattgcagttctcatgactctctacactgcgatctgctttttggtgcgtgccttatccccactttcgatcgacagcaactaacaatccgatcgatcgcagacgcttattttcgagtgttcagatatccgatcaaattgggatccttcggtgaaatcaaagtgcttctctcgtaaacaacttttggttctgacctatacaaacactggtgagattcgctctgtatgggtttaaataaacgttttttaacttgaacagcattgaatattctgactgatctgatcttcgcggtcctaccggtttttatgctacggtatgctatggtcatcgctctcttccgatgagatgctaatacaatacagtcatcttcaagtcaatcgccgagtgaaagcctctctcatctgtatcctaggcctgggagttttgtacgcgacttccaatccaatcccgtcataagccatgctaattcatctactcccttagtgcttgcgcagccgccttcgtcaagctctctatcctatccagctatggcagcgccggcgacttcctctgggacttttcaaacctcacaatttgggtcgtgtaagttaactagttatccaccactttaagccattctaacaaaaaatagcacggaatgcaacacgggtatcatcgccggcaccctcccaaccctcaaacccctcttcaagagaatcctcggcacatacggctcccagtccaaaacgacacgcgagtaccccggcagcaataaatataaactgcactcgatgtcgcgatcacggggcggaccgctccaatcccgcggccacaaaagcggcaacctcagcgtcatcgagtacgacgccgacccgcagaaccaccgctcccagctcgcgtctacgaccggctcggctgcgtatgcggggagtcaacgaagcaattccagcgaggagcggatcttgccgattcagggtgagggcattgttcgcacgaccgaggtgatcgtttcgcgcgagcagaatccgccacagatgtcgcccggcccacagacttcgccgaggttgaatagaatggggtcgctgaatggattacgtatcagcgccgatgatagggtttaggatttgttttttcttttgggagttatagggtggcaagtttattcatattgatacccgaagactacaacatacatgggcatataatctgtgtatctataataaaacgttgcccggttgttacacattcttgaaaagaaaaagagataactgtcttatctgtacattgcgctaggtctgcaaccgaggtactctccctttgcattccgaataaggggcaaagggatgacgatcaatcgatatacgaagtaacaaagtgattctgtattatattttgagtttgatatatgtaaccgtaacaaccgtaacaattgaaactttggaaccttcaaggttggagtcgggaaacccccgaattgtttccatggttcttttattcttggtacgctccaccaggtaccagactttcacccacacccgcaggaagtatcttttatatagcaattccatacaaaagctacctatttacagccttttttacgggtggttacgcctactaccccagtggtgacgcatacccaagcgtcgacccttaggggtccaagggtcttaagggttcagagaattgcgtgcaagtatcttttgtattgagttcctatataaaagatacttgattttacaattcgtgatccacctagttatgtagcttaccccaattaccagatccaggtcgggcagatccgaacccagattcggtatgtatcttttgtataacgtacccatacaaaggatacttgttaattttcctcagccttcggactggttagcgggaagcgcaccaatatataacgcgagcctagctccaataattgaatgcttctaacaagaaataaagtttaaaaagacactaactatatagtacggagtacggagtagttgcagaaacaaacgaaatgccgttcctttaatatgttaaacattcccattaaacttcaattaataaggtagactttctttgaattttatcatatcttgaaattgatcttatgccgatgatgtacttgggaagtatcttttgtattggccaaccatacaaaagatacataatttctggatatggcggtatttaccgctggcggagaaggtatgtgcgcacggttacatcggacattgctgttgcactccacttctcttctaaatgtctcacattgtgtcggttagcctaatgctaggatagtggcagcaatctggatcacttgtggaatcctacaacatatccagggcacaatcctaagcgcaacactccctaaccaggactcgaaaacgccagccctgaacctcatcgacacatcgttgtccccacttggtacagccgaagatataacccttgaaccaggacaattgagcatttctatgctacttgtccagatggcggcatacttaaagccacccggaagctgaaggatatgctggacgagagaatgctaacacttttacagtgtgaccgaaggaattcagatccagccagaaacaatcgtatttggatatcaagctcgggaagccactaacgagaagaataaaaaagaagatatcccggagagctcccatttcacatccacgcacacccagggactacagcgcccctcccagcaacagccttctccccaaacttctcaacataccacttccgtccccagcgcgcatggggcaacatattcgtgaccgcgttgacaacaaacaccacagccggcaaaggcagcggcacagcgagcttaccagccgtccacacagcaggcaccaaccacggcgctagaaccagcgggggagtgatggccgaagacgccgagacagaggcaggcagggcggagaaggggacaactgccgtaccagccagagcaaagccaatccattcgagccattcgaacacgtagtgcggatacaaaatgtatcggaagacaccacgagaaggtgggatgacgtaaactttgtggaacatgtttcctcccgctcgaggttggtcatctgcctttttggcagcgcgcttttcggcctcttcgcgccgaagtcggaacagggctgtctctgagtagatgttcccggccattccgatggcaaataagattacacccacggtggggaggagatcgcccactgcggagcggggacttccgctgctaaccatgaagcttgggataatcggcactgtatatccgcgcaaccagccggccagacaggcggagttgaaccaattgaagaccatggcgaagaccatgatgctggcgtggattggggacatgctaggcgcggagaagaagggcgagatgatagcgcggttgaaatagtgtgtgcagtacagagttacgatgaggatgttggaaacggggagatcagtgaaggagggtgcatatggcgatggagtgaccatgctatagatcaagttgatagggccgacaatctccatggcagaccaggcgatacgtcctgggatgttgaagatggactccgaggaggttttgcctgctgggtgccaggacaaaatccattgaattgctgtcacctaaatgtcccgagttagtctggtagcatctctccaaggcttcagggtcctgaccaggggaaagtattggaagcagcatataacagaggtgtagacagttggggatggagggaagagctccacagcaggaggcagagctcccaagcaagtggaaatagtcgcacccatttcgattgagagaagagatgaagggtgaagatggcggagggtaaacaggaagcttaaagcttatgtggaaggcggtgggtcccgggtaagcacttaaacttctgctttttgtttttcttttttttactttgtttagtcttttaaatcttttagaagaacaaagcctgttgggtatattcctgttgggtatatcgatcagtatggcaatttctaacaagatcggtgaattgtcgacttgagaagggcacatacgggacaattcaaacggggtcgtgcaaacgaaagtcctcctacaactacaaagggtaagacaagggcaaattaccagtttcagcaagtcggcgacaagactatgttcgtttgattctctacttgacaaaaatcacatgtgtaaataactaaggggatgattccacatagacagagtgtattctgtaccgtaaacgctaatgccctagacaagcaagcttgtgaattaaatcataaaaagctccggctccttaatttgaagtgtccatccgatcatgcaccatttccctccgtttgccagctaatttctcatttttgaacgcctcaatcttggctttaagttcggtatctagaaaggtggttaatactggtattggaacaatacctgggaaagaaaattacttaccagctactacatcctcaatcttcaatgggacacggttaaatggatcgtgggggtcactcaggagatgcgagcgaattgtagcgcggtcgatggcgatccgtgagctgggaagtatgacgggatcatccatgagggaatacattagaggatctaaaaaattagcagctgtcgaaaaaggatagttcaaaaagggaaaaataccgaggaactcttcagggatctcgcccatgtcttcctccgcttgatcatcggcctccttggcagcctggaccttcttctgcagctcactccagtggtgaagctgctcgggggatttcagcgaccactttcggataatatcagccgccttctcgaaattggctggcttgtaggatcggccatcacgggcaacagccaggatgaagttttccttgccgatcagattaagatagacgtcgacaatctcactcagaagagcgcggggattgaagccatattcctgcaggttgtccactcggagattggagctcttgggtcccaccattgcgtcgagattgtagtccagcatgtctgccagtcgctgcacaatttcaggcattgtgaacgagtcagcaagcgcctcagtgaatagcttgagcattgccacggtttgattagtcagttgcatgtagctcttggcgctgcgctgcgctgatgacaggttctcctcccgctgttggcgggttgcggcatccattgagttgccctgtgtattcagctcggtctgagtgttgtggatagtcttgaaagcaccgaaagattcatcgaggacgtaagtcacatcgtttagtagaaggttaacgaattggacgaagaaatccaggttctgattggcttgaagggacaacttctcccgatacagagtgttgggccagatgcatttgatgatctggaagatctcgtaacggatgttaaacttgtcgtagaattgggaatgtgttcccgtgaactctgcctcaatatagaatttcatgaccgcatggaggagatgttcgttggcaaatggcatgctgttgagcaagtcgactaaaacaccactggcgccaccagggcgcttccaggtgcctcggaacagaatggagatcagtccggctttcagatagggattcttaatataggtcgagcactctaggaatgtgatgcacagcattaccagctcatctccctgggtggccgtaatgatctgtggcatgcaccacatgataaacttgaagttactgacaacatcctccaagaagtactctggtagacatttgaagacttcgggctgctcctctggaagaggcagggtaacttgctctttggggaagttctttccagacacaagtctcagaagccacacggtaacatatcgcatgaatagcatagaacgagcctgccactgctcgtcgaacaacacaccttggagactgtatttgagagcgatgcccagttcgagcttgtctttgtacttcttcagggccgtatcgaaggtgcgcaattgctgtggattgttgagccaacgaacccgctcaagttcaaatttagtgattgtactctccatctgtcgcacatctttctcgagttgctccatctttgacgtcaatgattcactgccgtagtgatgggcggcgacagtcaggaagaatacttcagtgataaagtttgaagttccctcaaccttcttagaatagaaagcgtcggaggcatgctgatcggcattgattttggtctcatcccgcatgtcaactcgagaatcgcggtggagataatctgcatcaactctgtcgattttggtgaatgctgcatccatgaacggctcacagagctggtcgaggcaagttgtaatattgaacatgaagccgtcagaggatacttgcgcagggtcaacctgcatggcccgtcgtttgtggttgatgttcatagcagtcgcgaaccaatctaaaacacgatctcgagcctctttcgaagcccggatcaggtggttgataacatcaagaagatcagaactgagcatctgctgcgtcattcggagcgatcgctgggcattggaaatgtatgcctggtccctggtcttggggctagagaaataggacagggtaacattagcttgaaggggtgagaggcggaaccatggacccaaaagagtggctttctcgaattgagcagggtcccttgtgttgttgaaaatggacgattctgtgattgctgccgcgatggaaccgtggcgaacaaggtttcgaagagcctgaacaaactggtcagacgtggtccagggaaattgtgacgtttgacttacaatggcgtatggcttgtagtcatcgttaacgtccatagaagagagctgcgcgctcaactgctcgacggcagagataaaggcaggcttgacggagtcgtcttcgtcgaatcttctcacagcttcgttgataaactcgaaatcaattcctctatcatcctcggggtcgatgagaagatacgaggctaacgatgattgaggggaccattcgctcctacagttcagtcagtatccagtgccagtgtagcagcattccagagaacgaacccaaacatctctggcattgtaatcgcaaagatacaatagctcatacacaggcgccgtgcctcacacagaacctgatacttcgggtcatcatctcccgtccgcctcaatcccttatacagttttgtgatgcgcttccagcacggcagcagatagtcgagtggacgctgcttctcggcctttgacgcagcctctaggagggcctggtccagaacctcaacctggatgcgcaagtcctgaccctcatcctgcagttcgctccgaagcccaggcaagtatgtacggctgccatgtatgtcacgatgcccttcttccttgagggtcactctgaacacggcacttagtgttcggtcttcgaaggcctctatgctttcgattttctgtggcggaggggtgctcggggctgagggagcggcgggtcgtggttgctctgatgaagccgcggccggtgtgatcttgatccgcttcccttctgactgctgcggggttggtggcgcgttgaaaaggcgactcggtggctgcaccgacagtggtgattgtgacggagatgtgttagatgagctctgtgtcgattccgaggcaccgtcggaggactggcctgggtttgagagctttgcaagtcgcttgttgcgaatcttttttttatcaagatagatgtcagtcctcgagtcgagtcactgcgggggcggtatagcttcatagctcgagtacaacaagaaactaaccttgtctgcgtcggaaagtgtgtccgacatgttagctgatggtcagacaataatctgctccagagaggttggcaagaccgctaatctggtggatcgagtcggcagaatatcaatattgtcgtgacggtgtaggaatcataaggcgtgaaagcggaatcaggcagctttaaagcctcgaagtgggggcaatggagtctagaatccgcagatgtatgtcgctggatgagcacttctgattccgtgatgatcgccgagattcgcttttgttctgattcgagattcagcgcggtgatcgaatttgactaagcaatccatggttgggcgtgggatccggggtacatataaggtactttggggtttgcgctaactatgcgcaaaatgccaggtacctatcaagtcactttttttttcctttcatacgttcgaaggtttaggttgttggaacataggaacatcttttctatgaatatactgttctagatattaaaaattggataacttgatatctacaggatttgtttatgtttcagatttatggccgcaacctcgacgaacttttgtgtgacactatatatatcttcatgtattcacatcaggacatgacatcagaaacgaaaaccaaagattcttaaacatcaggggaaccaaaaagagaaatttagcaagatcctaaatgcatttgaaactccaaaaaaataaaatgtacagttgattaactgagacccagatgccacctttgtggatgggctaatgatattagagcacgttcttttgcaaaaagagcctccaaaaggaacaaaatgtcataaaaaggcgcggcgtaagcctccaagtccgcagtgcatttaatatctcaccttcgtcttcagttggtccagacgcctgcagctcggcatctccatcgcacgagccttcttcattttctcaacgtcagggaagagccacccctgcgcatcttgcagccttctctcccgctcatgggcttcggcgtcacattcattccgcagtgtcctgacatattccacctccacgcgcgagtctagctcgcgaaagttccgggcactatagctatccacatcgagggggttcacaaagtagttgaggttgagtttcggggtcacgcggccgagggtatgcggggagacgggggtatcaaagcgataggagggtccggatggggttgaggagccagagaagagagaggagaggagcggcaggataaatagaatgataagcggcaatagctggcgcaggaaactgcggctatcgatctgagcttcctgctcggtggctgctgcgcgaggccggcgacggggcgcctggcctccaaactgatgcactcggaacccggggccacctcccatgttgaagacgaattgcggaccgcctatagtaagacaggattagctcgagtaaaacgaatatcagaggaagctgtagtaccgaatccaccaccgcccattccgccaaatccaccattaaagaaccggttgaacatttcctcggctgagacttcctcgttgaatctttggtcacggccgaatccaccaccgaatccaccgaagggcgacgcgccgctcgaagcgctcggtccgggttggaacctgctatcaggatcgccgccgaatttgtcgtatttcgacttcttttcctcgtcggagagaatctggaaagcacgcgagaccactgccaccgcgtaagaatcaatatgtcaagagtttggctaggggtgctcattgctcactcttaaacgcctcgtctgcgccctcgtgcccgtttttatcaggatgcgtcaacaaactctgtttccggtacgccttcttaatctcattatccgttgacgagcgctcgaccagcagaatttcgtaaaaggccgtaggctggcatcttcgaatccgaagcacagcagctttctgctcttctgtatacttgcgatcctggttaccttgcttatggtcgcgcgacgtcgcacctccgcgtttggcgtcagagccagatgccgaagccgagggcatagcgaccggagtttatgggaaaaatcggacagatttcgaatcaacgtttgcttgctggtgtaggagggaagagggggtcgagagaatcttgagggcgtagacggatagaggagaagcaatcccgcacgggatacggtcgggtcggcagattaatcaaacgtgtgatgagatggccaaagtaaaatatcggcctgatcaagacgcagcaaaatcagagtcacaggagtggctgattcggcgggcatgaattggggaaaaagcgtggtcttaggtgtctttgccaagcggcggaacgtcaattagttacattggacatcgcgataacatcactcgccaacattgaaaccgatagacttgccaacatccccaagtccgcgatattcaattgtgagtgttctccaggtcaaaggtcaattaaagcacaccggtcttatttatatacctgcagcaaacgcaatccttggccgccaaagctcgcggtcttccggtttcatcaaataagtcctcgaagctcaattcctcaccatggcggacgattcaactgtcgaagagaccaaggagacattaatccagcgcttccgagcctggggtggtaagtggtatatgcatatgaatagcttggcttcatcggagcgtccaaacaagcaatgacgccagtgagcactcactaatgtcgtctctcaactgcagaaaactcattcccacccacattactcgcctccatgatcgcagcccagcacatgcgccctttccagttcttcccgatgctctttccgcctgtgctgatcttctccagctatgccaacctgcagggcttcaagacggacactgccggcatcagcggggccgtctcgggactgtatctgcttctcgcagcccgccgtcgacagccatttatgaagaagctgggtgttcggggcgtcgtgcgcggtgcgaccatgggtttggctttggtcaatatgatcggtggtgggttggcgtatactctaggtaggaaggaggaggaagaggatgcgtcatgatcgagtgacaacttataacgacgcgaggaccgcgatgccatgttggtgtcgtggtctgtttgtataatacgtgtatcaaaagttggctcagttgtgcgtttggcacgtgggtgagttcacgactcggtctcggtgggcatgggttttatgaaatatatgcattatcactacgaaatacacttttggagatagactgtaagagtctccagtggctaccacgcctaagtaactacactttagaatttccagaatacagatgctccgacagcaagaactgccgcacctgttcaggaaccagccattccaggtcctggggcgccgattgcgacgcctcacgagctctagttgaactcacgggttgatcagtagggcgacggccctcgacaagctgaatccggtcagcccattccctacgggcgccgtcgctatctcggtcacccctagcaagggccgccaaaaattcttcctgctcctctctcccaccccatccatcgctcgggcgcatagtcacacgtagtcggtgctttgaaaatagaggcgctagagacttcaagttatgttcaggcggatagtacttgagatcgaagatccggatcaaagtatcgtaacccatcagatgaacctgttccattggagtggggtaagaatccgatgcctcgatagcagccgccttgtcgatgaaatagggctttttggtgacgccgatatcgatcaacggaatattttcgacggcatgttcgaaagccggtgccgatgcgagttgggggcggagatcccgagcgaacagctccatcatcgcgagccgatcctcgaaggaggcaggcttggatggcttgtctgcattatggattgcgagaagaaggagcagacgacggcggggtcgggagttttctagaagtgccgtgctgacaatgcggaggtgggcacgggtggggggattgaacgacgagtctaagacatagagagtctctgggtctgcggagggaccggatgggatggttgttaggacttcgaagactttggttgaggttgtgaatgccttcagtcgtgaggcatactgggttcggagggcttggaacgaggacatgcttgtcagttgcttgactgggggtgatcgtctctaggaaggttgcgatgcgggccgaatgcaggtgatcatcgcgataagatcatattgtcaccgccttccaaatttggaagatttactctatgtaaccgacattgaagatattccagcagatggctccatgatactccgtacatgtatttaggatcttctagcggggtcctaagcaagttccattgctactccgtactccgtccaatgtgaatattcctagtctggagagttggagggtacaggggtacgaggcaaattgtaactaatttccaagtgggatgtttcatgttggaaagcttctccgtgccgaccacaaacaggctacaacatacacgggaaacgggaaacgggaaacggaagcgaaacactctgaaaagataacccaagtttttccaaggaccgtgcctaacccaggctagacctcttttaatcaattcatccgatacacttcttggcggattcgagagatgtgccccaccgcctcccacagagacggaattaaagtgcattgtatactccatacatcttcacttttatatggaaagagtagcatttatactgccccgtggagtccagaatgccatctttatctccaacagcaatttatatcccgacaatggcggaagcggggaccctggggacacgggtgggagactgctttatgtgaaaccttcccgtgcttgtattgtgtatatcgcgtattattacagacagtagaacattgaaacttgaacttcccgaaagtgccgcggtcgtaatttttttttctctctgaatgaagatcgtctggattctcgggctttgtttcctcattggaacacatagttatatacaatatactccgtacacaactagtaggaggtacattataggcctatagacgtggccgggtattgtcagacttttctgcccctgggcacgttcatatatgaagagtccgtgccctaagaaaccgtttagcgacaggagtacaaaagtacggagtacacaaactcgtacacaaactcgatggcctaatacccccttttaagcactctatctaaagaataggggcggatacaaacagcatgtcagtgacgccaccgacgccacatcaccttaatccagaaagcccagtcgctaagaggctcatagggtttgccaatatcacgtagtgtgttgtatatcttacggtgagattaaaggtcacagtccaagtgcccacgggctgcttgggatcaatgccaatggtccaatgagagcccggttcctgggacggtggacacgccatccatggattgaccgcagatccaccggtattaccacggttggaggtgaccaatagggaattaatttaaaattgatagtgtagagtgtaattttaaagcgaaattggaggaaatgagttaattaccttggtctccatcttctctgctctctttccttcttcaagctggcatctcttgactacttcttcttcttttcttctctgtgagaagccatacgttccttccttgcgaattgatttcgcatcttgctctgtcgctctttcttcagacacacactcacttacacacacactcgctaactttgctttgcattcttgcttttgacatctctcgtcttacccctccactttttcattgacatccaccgtcgtaccaataacttcatcatggttgtcatgaacaagttctccgttgcccttgtggctgctctggctgccgtgggtcaggccactcacgagggtctccatgcccgtcgcatcgtggctcgctcgcttgcccctgtccccgaggcctctacggcttctacctcgaccgtcctcgttgtgcctactcctgtcgagccagttcctgaggctacttcgactgccgcgtctgctcccgctgaggagacctccgccgtggagtcttcctctgccgtggcgtcttctgcccctagctccattccttctgttgcttcgtctgtcgttgctccgtctgtcgttgccccgtctgtcgtggctccgtctgtcgttgccccgtcggttgttgctccgtcggtcgttgcctcctcttcggtcgtttcggcccctgaggtgagctccgcgagctctgtgcccgtgttctccagcaagcctgtggtcacccgcactcccatcagctctcgccctggtcttcccaccaagtcttccgatgccctgtcttccgatgccctgtccagcaccgtgtctgctcctgctggcacttccgcccctggtgaggctgtcactgtgacttacaccgtgacctctggcgcctcgactagcgtcatcaccaccaccatctacaagaccgccactgaccagtacaccatcactgccgtacgtgttagatctgatatcttatgcttggtacttgtgaactaactttgatatagaccgagtctggcgctgatgccgctgccactaactctgctgatgcctccgccaccaactccgctggtgcctcggtcactaaccccgctgaggacaccacctccactcggacctccactatcaacagcaccaagaccaagaccgtcactctcatcgagatccccgcttccaccagtgctgccagcagtggctctgattccagcagcggctctggttccggcagtggctccggtgcctgctccgccgttaccgttaccgctactgtcactgaaaccgtgactgctgtatgtgctgctcattcccctatcttacacgtcaaatattaacattattctagggcgccgtcgagacccagtccgccggcaatggcaacggtgagggcgcacagagcacctcgactgaggccgctgcttccaccgagaccgcctcggtttccaccacccgcacttacactgcatccacccgcgttcccatcacccgcactcctactccttccagcggcttcgctacccgtactcctaccgccagcgcaactgtcaagcctactacttatccctcggccaccagcacccccactggcgagactttcttgtccaacctgcgccgctacttcttctaaacaacactgctgatgtgaagggggtttccacctccacatggcagcgagttgcgagcctatcgatggcctgagagaaagttccgattcccttctactcgcgcagaggcgtgctggtactgtacctattttttgccaagttccggtacaaacggattcaatttcacttcttatttacgctccattttttgccatgtttcttcttttcgacttctattcttgcaatggtcttgtcatgctggattttgcattggcccacgttttctctgcttgttacgttttgcaggcatcttcaattcggactgcggtgccaatctccaacctcatgacatttccttgcgttacatttttactctccaatgtgaaattgacccattcatatgaccggtttccattggactcggaacattttctcacgtatcgttatgatgggtggtgacacgtctgttttatggactggatcttgcctcttttctcttgtgttaatggaaaattcatcttgtttaatctttccacatttcatttgcgaatgatctcatagttctgtttttagtcttcatgtttttctttccacgtggaaggccgatatcggtatccttaggacagaacctgaattgacaaggctttgcctgtttacgaaatgatcactactccctttaataatttggagatcagtagaaatagagtgaggctgttcatcctggagagttagtaaggctggcctgtggatcagtgtcgatcttcttgcgctggcagaaacaacacatagttgacgtcgacatacagtctacggagtaggatcgtgttattcgtccattttagagtattaatgtacgtaaagtaggataatatacaaaattcgaccaccaacttcatcctagaagagctcacggcatcacccgtcgtcaccacccagcttggctccgctcagaatggatactgacatcttctatggcatcgaatccaacgcctcaaccccttccctcgcaatcctctcccgcataatttgccattcaacccacgtcacaccctgcaacaaacaatccgcaagatcatcgagtttccccagatcaacagccgccacctcgtcccccatatcagacaaaggagatccaggcaatggagaaagagatccactcttcaaagcccgagaccccttcccttttcccttcttcgacgcctgcgtctggccctgccatttccgcagatacgcacccgcaacagcatgcagggcaggacactccgatttatccgcgagcacgatcttattatcggtagcagtacccagctttaattccttaagaccgccgtccgagtctgggggagcattagtctgcatcgcagcagaaagccaccgtccaacaagatcaatcttagccttcttcacttctcgcgcattgggtttcttctccttctctttttccccgacttctgatttctcccccgcgtctccctttcctagaactgacgaaccttcaagccaatacctgactacccgcctcggctcaacaccccgaataaccaaatcagcgatatccccgcccctctcctgccgcagcgtatgcagaacagcatataacatgccctccagcacgccaacgcgcagcgtccactcaagcaccgcactcccgccgcccgagcggaagcgctggcgctcaatgagcacgtgagtggggcggtatgcagcgataagtgacgagatgagggtgtacgcatatgcagcgtagacgtctggagcgaaggcgtccttttctttttctttttctttcgtaatagatttggcgatcttgccgggtaggctcttttccgtagcgccagcgccagcgtcacccgaccccggtgttggtgttggtgttggttggatcacaccggtcttagcccccggtacgaggttcagagttgatatctcagaaatcgcgagtcggtgccaggctgtcagctccgggggttggaggtgggttgttgctgcgtcatctggagctagacctgaaaccccggagcctccggagcggggcacgcgcagatgcgcgaatgcgaggttctggatccccatgtcgatgctgaggatgctccatggttgggattgagcgggatttgattttgacgagtcggctgacttggtgttgggatttgtcttgcttgggggcgtttttgggggatctagccgtcgatcaacttgtcgatcttggtttagactggggttggtgttggtgttggcagcactgggactgggccttggaatactagtgataccctctgcaacgccatccacggcagccggcagctgcagctgcacctgtgactgcgactgcgattgtgactgtgaatgcaacgtcaactccgctgcaatgcgctcaatgagaacacccttcgtaccggacgattggatgcccgttgcgcgtgcgatgcgctgcaattgtgctgatttcaagcatgcgagccaagggtgtgttggggagtacagcgctgcagagagacgcatttgggggcttgtttgtgcttgttgcttgctaggggtggcatttggtggggcggggtctgggctcctggtacgaggtgaatctcaaattcctataacggcagttttaggctggatgcatggacatttttgggaaatggattctttgaggtggatgggtgctgatcggtgcacggaccgtcgacgctcacggctaccgtggcactgggtcggattgagtttgatttttgttatttccaaggttctttctgaagtttagttgcgatagagtagactgtcatttcttagatagacctctactatgttgtagtagctgataataacaagtaaaattatatgcgccttctatttcccagacgaaatataacaccgagatcaccttgtgttggtagaacaccaggtgtgaataataaaactccccccataagaagcagtaaatgcgcgctgaaaagccaagtcaaacaaaacacttgcgaagacagcaaggcaataaacaaccgacatcaaaaatcctccaaaagcaaaagtaaagagcaaaaccaagcaagaccaaattatacgaatgctggctgctcaagctcggtcattgcaatctcatctcggagatacaacaacggagcccaaacacgccagtgcagtacacccaaatgagcaagacgtaccccaatacgctcgacatccgactgctgtggcgtcaaagccagcgacgaagtattgttcactgacccagacgcagccacagtcccagtctgaggcacagtagtacccagagtggcagacaccggagcccgctgcgactcacagatcgccaacggcgaaagcggcaagtatcgacgagccgctgctatcgtgctagcaaggatcttgccacgcatgctattttggaagaaaacgaagagctcggactcattcgagagatgccactcgagcgcttcctcgatgggaacgatgacctcgtccgtgacgacggggtcgagctgcaacgcggcacaggcaaagcgggcaatctccagagcaatacagcgcatattttgcgtccagcgctttccgccgcggtggtcgggatcgtcctcgttgttgtctggattgcttgcgatgcggttttccaggtccataccgttttccattagggaccagatgcgcgaccggaaggtggagtaggtttcttctggggtggagaggtaacgcttgtgcttgttgatgtaggactcgaagatgtaccaggcgatgtcgaggttgattagattttggacggttgagcggagctgccagaggcgctcggagtcgaagaggaaggtttcggggaagtcggcgggaggggcgaattggagcagttgggcggagattccgcgaaacagagcttcgaggggtttgagattgctttccgtttctggagttggggttgtattttgggcctccgcatctgcatcgtcttgacgggcttggtcacgcactgatatgtaccagtgccgggcggattcgacctggaagccgccgcgattcattttgccttggaagtattcttggagaaaggggactgtgtcttcgatgaggagaacgcggaatgctcggatttgatgattggcgacgtcctatcaagtcacgaattagttaacgccgcaagaacagagggacttgaatgtgacataccaacttcatagcctctagaatagagaacaatgttcgcagaccgctgacaatctcatggggatcctgcgactctgaacccttttggatttgatcgaccatagaatctgcccactcgtctcgcatcggagcacaatgtgtttttagtagtttcgctagccaccgagccagcgtaagcatgtcgagaacgcctttgcgtatttgctgcatcagcaatggaacttccaggttttgcatgatagttgggtgatcgcgttccggaacaagggtcttgatgacgtcctgcaatgtctcgaacagggcgggcaaacgcggatcgaaggcgtgtcgagtaccatcacttgattcgcttttctcggtggcaccggcagtcgcggcgtggtaagagtaaatagtaatctcggcggccaaggcatcccaataatccgcggcttctttccgcttgcgttggcccttctccccgtccaggtcaggcttgaagtgcaggtcgcggtcgaagttggcgtccatgcggagattgatgttgctcatgatacagggcagatcaagctcgctaagcgttttcttcgtgactggcggatatctccgagccttacgcaataggcgatgttcacggggatctagtcccaaatcttggggtatactgatagcctccggggacggggatggctctcggggccgagaaacagcggctggtaccggtgaagtagattgttgagccgcatgaggataagcgaagggctgttgacggcgacgaagaggatggatggagggtcggtcgtcatgattgtgagaatctcgcccctcgttcttgtgatactctttagaacgaccatttcccgcaccatacgcctctagagggccttctgcgccctcctcctgggtccgggcttcttttgtgccttgtagatccatagttaagcacgatatatctgaacctccctactcagacagtcagataaaaggaagatttcagggtggcaatggcgagaccacgccatgcacctaaccacagaacaaggcgagtacgcccctatggaactcctacaactcacaaatttaatgggcccctttttgcctcaggcaggcagccaatccgcattcaccgaaaaagtgatgcaagtgagctgtcaattcctgtggagccgaggattgcttggatctgcgtcgatcgcctcgtggttccgatcagggggagaaggtcaaaaaggggtggagattcaaacgtttttaaaacaacaaaagggtacggagtataagaatccgaataagagagaatataatcttccaaaacaaagaggtgtagagtatgaaacggggctccgatagcagcaaaccagggtggggactccagtgtatactctagggcagacaaatgcaaattgtctcgagagagcacaaggatgcaggacaaatggacaaatcaaaggaaaaaagtaaataaagcaaaggagttggcaaagcgaccgggatgaactgatatagcgagtgtatcccagatcgacaaccggattcgggttgacgcaagcagacattcccttctgctgctacccgcgagcagactctcgactacctgggagatctcaactgtcacatctttccatttccgatttgaacttgcatctgcatttgatgttgcttttgggaaaaaaaggggggtactcgcctcactttgaactttgaaaccagtgctggccacgtgagggtgaatctccttttctcggggaaccactggatgcagtcgagttgcgcattaccaggtgcatagtaccctccagcttgccagagaagtactcagagaagggttcacagatcatcgagaagagatgaagcagggcctctggtctggatcggaatgtttttggatgtgaatgccttggtgccttatagactttatgcctgataaacaaggccctatatcccttgagacagccctattctacttctacctcaccacttaacttccaccaattgagcttctcgtttagctcagatctaaataaaattactgtgattcatgaggcatccaatgtttgtagacggatatgagctccgtcaagcacccaagtccactggtcatgtctttggcctcaataacctcgctagcttattgacacccaaatctggctcaacaacggcctgctcaatagctcaataagaaccatgtctgacaagaaataaaataaaaaggaaacatgatttccacgtggaatcttgtctgcatgagcatcctagatctttactaggcagtatcatctcgattatcttcacaaggcgtgcgaagcacggccagtttcaatcatgaatatttccgcactactctacttctttcagatcctatgggcagctcctgggcttgtccgctcgcgaggaatcggttcatacaatacttcacgatttgaagtacatgccttaccaggcgtttcggacctaccatccagctgggctggtcgccttccggttccggggacagaggatggaaatgagatctttttctggctatttcaatcagagcagccggcatacgatgacaatctgatcagtaagtctgattggagggacattcaaaggcgatggttaacaggctggatagtttggttcaatggcggccctggctgctcatccttgataggtctgacgaccggcaatggacccatttccttcgatggcaattcgactcgatttattcgcaatccacactcatggacaaagctaggcaatgtgctttacgttgatcagcccgtcggcactggctactccacggccagcttcccatacccggttaaggacaatgttcgggtaacgacagacttcacgcagtggttgcgtggcttcttcgaatatttcccgcaactgcagtcaaagcagatccatctgatgggggagtcatatgcgggcatctacataccctatttcgcatcggagcttctcgacggcaacaattccctgcctctcaatgtgcgttctatgtctctgggtgatggatcctggggaaatggagcagccatggcggacgttgcaatgggtaaatatatcaggtcacagttgggcttcctccaaatccctgaagatgttctatctgtcttcgacgaagccgataaaacctgcggcttcaacgacgtgctagcaaaatccgccgtataccctcccctgggtaaaatacatatccccggaaacccagaatacttcaacctccgacgtcgagacttgacaaatgccgtcaacgcgacatgcgacatctcacccaaaacccccgaagcagtccacacatcaatcttcaactcaacttgctacggcccctgcgccgtcttctctacagcaagtgattacctgacagccgtattcaccaaccgcaaaattcggggctgcttcgacatctacgacgtttcccacgactgcagtgccatttcagagctcccactaatggcagagtacttcggccgcgcagatgtccaggctgcccttcacgtcgataatagcggactctacaacgcctgcaactccacaattctgggcacgctactatcagtgccctcccccgtgccgccggagtacttcatcctcccgtctctggttactgaccacaatatctcgctccatatctactctggcgagtgggacatgatgatcaaccactttggcgcggaactctcgctacaaaatatgacgtggggtggtgctcagggcttcgcgcagaagccggtcaaacctttctttgcggataatgccgcgccgtcggcgaccaagcagctcctgctccaccacacaccggttgctactacattatcgactgcgaccccgactgctgctgctgcgggtacgtggactatggagcgtggtgtttcgtatcacttattccgtggggctggccatagtgtctttgtgaataagccgcgcgagatgttctcctttgtgagggatgtggttgttgctccgagggctggctgattatagggactggcgcatcttgggttctggagttatcaaaattgggttgtgatatgcattttttagaaaactttttattttcaaaattctagggcacttggacttgtaacgagaacagtaatggatgtcgacagaaatgcataagaaaatcgcgagtgatcgtcgccagtcagtgccaaaaaaaaaaaaaaaagggaccataaattcagctgtcgtatttagtaaccaattccaactacactaggatgagcattgggatcaactacaacatacaaggtcagtactacctaactatctgatgcctctagccccaacggacttctcgtccgccaagcttttcagttgcattccaactctatatagcaatccccatagcccttgcatttcccgaattccatcccactaagcagagccttgacagctgtcatatcgcgagagaaacctgagcccagattcacaataacatgagcaagataccattaggataggaacaagaatgaggaaatgacgtgttaagcatgagtacattactccattactccatggctctaggatcgagtcttgagttttatgaacataatggaaatttaatgtgttgtaacttcaaggggttttctgtagtacatttctgatttcagccacaccacttaagtaggccaatttgggaataaattgataaaggactgtaatatagggcctcccttggatgcgacatagcctccgaacaaaccgatacatcaaaacttgagagttcaagctagaatgctatttgaaggggcgttatcttggctactgcgtattactacatacatgttgctttcattcttgtaagtttgagtgttatcatgctgtagaatgccggtggcttttgttcgatctcgtagcgatcttctaatttaacgactcgatggtaattcttctctatagctaattcgaatatacacaaatagccgatatagaagcagctcattactattgtttatattgatcacatgtcaaacaggtccgatgttcgggtgtttgcgtagaaatagaatgcgatatcctctatacggcgatcatccaatttgatactcttagaaaaaatggtatactcgccccttacagagccgcatactctactctatggtattctccttggtcacaacaaggccctatacagctagggtaagctattgggggtatggttgatagtcgtggaagatcaatttgattcaaggacttgctctgaaaaatctggaaatatttaaggagtagcaaatcccgtagtatcccgcggcgaatcagtttacttacgacatcgaatttgtggcaacagaacaacagaagccatgttgcgaaaactgttcacatccgccctcctctttgctgccctgagcaatggacagacggctcctgacctcgggaccgcggagacttttgctgtcctcggtggctcaactgtgacaaatacgggcccaacaacgatcactggtgacctgggagtctcgcctgggactgctatcacgggttccggtcaaattacgatcattggatccgtacaccaagctgatgcagtcgcaagtcaagcacagaccgatctgacgactgcatataacaatgcggctggccagggaccggccactgcaatcgcgacggaactcggcggccagacattgattggtggtgtatatactagcccaacattcgggcttaccggcaccctcacgcttgacgctcaggggaatccggatgcagtttggatcttccaaatgacatccacccttatcactgccacggactccaatgttgttctggccaatggtgccaacccttgcaatgtcttctggcaggtgggaacctcggcaaccttgggaacaaggacagctttcgtcggaaccatcatggcagatcagtctatcacgttgaatactggcgcaacgatcaacggacgggctttggcccgcattggggcagtgacaatggacaccaatactatcaccaatgcggcttgcgtgacaccacccacaacgagcactactgtgtcgcctacgacaaccacaacgacgacgacgacgacgtcgactactacgacaaccaccactaccactaccaccactaccacgccgactactacaacgacaaccaccaccacgccaactactactactacgacaactaccaccaccactactacgccgactaccacaacgacaaccactactacgccgactactacaacgacaaccaccaccacgccgactactacgacgacaactaccaccaccactaccacgccgactaccacaacgacaaccactactacgccgacaactacaacgacaactaccaccaccactaccacgccgactactacaacgacaaccaccaccatgccgactaccacaacgacaaccactactacggcgtctaccacgacaactactggcaccaccaccaccaccaccacaacatcatctaccaccacgtcatcgtcatccaccacgacgacaaccacaacaacgggaaccactacaacaggaaccaccacaacggggaccaccacaacggggaccaccacaacggggaccaccacaacggggaccactacaacggggaccactacaacaggaaccactacaacggggacaaccacaacgaaaactaccaaaacgaagactaccaaaacgtggtctaccaccacaccatccagcacaacgctgtgtactaccactcctaccacaactatatgtaccactacggtatggacaaccacgacgctgacgccatgtacaaccccgacgtcgacaacatgttcaacctcgccgtggacaacctggccaacaagcatgcaaaacccccacaaccaaggctgggaagaacacgacagtaaagactacaaccaaggctgggacaattacgacgacaaaaactacgaccaaggctgggataatgacgacagcaaagactacgaccaagactgggaagactacatccaagccaatacccaaggctggacagacgacgacagcgcgtattaagccgacctttgagaagagtcttctgatgggagattagatgggttcagatttataaattttgggcaattgttcaatgggaatcacccaagatgttgtttcatccaagaaaagtaatacgagggataggcgttgttggcgttagtttacgaaatcaaaccggcgccggaacaggaggtaattgcttaatatgtatcgaatactcatgttttaataatatcttagtccacttgctatccttttcaatcaattgtcaacaagagattctggttcctactacctacgtcatgatctacttccccgcaaaatatggggtaaaccaggtgatctattgtatgaccacaaagtatcagcccacctcggtatccatcacttgccttttctcttctcttctcttttctaaacttccctcctcttctttacatctcacacatctcacatctcccaccatgacaaaaggattcgcaaccatcacccccgaatgcgaggaagtattcgacgaggtcaaaggaaccgacaacttaaactacgtcatctactcagcctctgcacacgacaaaaagatcactgtcgcggagtccggcaaatacaaggactacgccgagttcctctctcacttcaaggataacgctcccctatacgccgtcgtagacttcctttacgactctcccgccggtgatggccagcgaagcaagctagtctttatcacatggtatgtatagacaccctggatcacattaccctgatctttacaatcgtcaaagggtacatggtactaactgttgaattgtatgtagggtgcccgaggccgcaagcattcatgacaaatcttactacacgtccaacaaagatcacctcttctacgccctccaggatatcagtctccatgtcctggcacattcacgggtggatttggaccataatgcaagtatgtatacccgcgaagcattgactccatctagtatgattgtactcgaaactgattttttggtttctcacttagtcctggggaagttcaaggctctctagaggggcctttaattttcttctcgaacctggtaaccgctatgtgaagaacgatccacagatcatgcatggtctggctatgctgccctagatacatatttcgtattataatatttcctatcttcaatcgtctacctctaccacctgtactacctgtactacagtaggaaaagcatagaccgaacataggacttttctaaatgacgggataaacgtcttttaatttcggatttattgtaccaaataccaggttcttccccaggatattaaccccgctgatgcataagaaacagaagcaaaaagcgctctaggtgtggtcaatggtcaaaacagagtcaatgacatgcacgatagattgcttgtacctcgattctttcaaaaaatatcaacccgctaaatcatggataaacagaatgcagatcgagaattggactgccagagcagttatagtgtgacaaggaaccacaagagtaacgttgccggcatgcacggtagattgctcatagtcataatcataagacgccagataaatgagcatggaggtagtcatgacacatagagaaattgagttctctgagacggagtgttaaaatttctcatagtcgcttagcgacggaagaacggggcttgattcgacgagagaagcgaatcagcacgttggaagacatcgccgtcgaagaatctgtcactgtatgcactggccggcgtggacgggacagtggcctgcgcagcggggccgagcgctgcactcagcggagtggcaggtacggtgaccgattgagggggcgacatcgtattgagttggaaagaggggttgttggtgagggcggatgttgagacggatgtttgatggtgctgcaggtgtgaggcctgtagcagagggccgtacaaggcactaggaggggggtggcggtccgggtctgtaagataggcccaaggagatacctcgatcaggcggcctgcttcccggcttgccttttggactgggcgtaggaggatgacgacctcggcaggtaaaagctgcatacctctcaactcacgcatctcgttcaccaggtcgacgaaggactgcatgaatgatttgcatagctgccagaactcgcgttggttgcggagtccgccaccaggttctttgattttcatggtcgatagacgctgtcctagggcatctgaaacttccaggcaaaactggcatcgacggatgaggttgttccagaggatttggattccctctgaatcgcgtgagtgttgagcagcttctagacaccttatgaattgccgacgggccaatggaagtgcaccgtatgcggcatgatatgtagcggtcagctgatggaagatcttttcgaatattcgctcctcttcgttttcatccagtccagtcagtgtgttgaaccggggagctccggaagcaggcataggagggaaagtttcgcctgagcgagggatggccagggaatgtggcacagatgtgttgatcatgtttgatctgctgctcgagcgactgcgtgcgtacgacgttgagaaaccaggagagctaatgctagtctgattagaagtcatagtcatggggtactgggggtgtcgaattgtcgtgtcgcttcgcaatcgtcgtgtgggcgggccaggatctcttgttggagtgaccagcgaaagttgagatcggtctgggacagaggggagtgggttacttgggccaaccaagcgtcttgtagcagagccatgtctgttgatggtctggagcggaactttgagaatagcgcaagcattccgtagctccgccaggctgccaaacatcgtcagcatcagcgatcgtacatagcacggatcgccattggaaactatcttggtgacattgttgcgtagctgcgtgccgacgtgaatgtaggcggcgatgcacgtctcgcattcacgtttaaccgtttcggtgaccgatgacattgactctgggtcattgcacaaagtatctgtcgctttctcaagagcatcgttcagatggtcaacgtgtgaggaagcattgtaaaagacaagctcgagactgtgccgtctggtgtcatcatgcttgatcacgttgatcaatgtatcgatgtgggaatgaacttgagcaagggcaaatagaataacttttgcactcttgattatcggttcatcggatccatgttcacccttgtgttcaggtagactggacatccgattaacccaaccatctcgcggacgccgacgctctctcgggctggtgggacttgggggagtattgtcatttgtggctattggcggtgtaggctgacgcggtcgaagcacagatccatgactgagacctcgtagatggctgtttcgatatgggagcgtttcatctaatgtacctaaatcggtattcttgcgactgattagtcccattcttttgctacgagcaacagatgacccttggattatgccctcgctgttgctccggttgcgctcgttaccaggataaggcgctacgccaggtctttggagaccaggcatatgataagtagcgccttgttgtccagaggccatgcgatagtgtgattttaatggaatcggcggtgcccgagatattgatggagagcgagacgagcttgctgagctatcaccagtgctgggaattactggaaaccgaccacttaaattccgctttgaaggtatcggcgttggtgccggtttagcctcaaaagtaccatcactgcgttaacaccgagtgttagcttatatccaccccaggaccgtaagatggacaaaccctgtatcaggaatgatttctggctcgggtgtactcgtctgttgtcgcgttttcataagaaatctcttgagtttggtcgtggccgcaacttctttctcgttgtcggtcatcccggattgtgtcgtctcattttcggtttcttctagaatttcacgtagtggctttcgtagaggattcccgacgcacttgaaaatttgaagcttatgcatctcggagaggccagctgggaggtcgatgaggcggttttgcatgactgacagaactcgcaatgacttcaatttgctgatctcatttggtaactccttgattttatttcggctcaaatcaagaatttcgagtaatggtagtttgtaaacctaccaagcaggattagcgccatgcaagcataaagcaaacttatcattacatactccttttgggaattcgcggaagttgttcgctctgatattgagatagcgtaggtgtgagcactctgcaaagcgataggggatatggaaaagttgattgttcgacagagatagccttcatagtaatcagtatatagtccagaacagtgataccgtatcctaggaacaggcaaaacaagacttgactataaaagttcaaagcaaggctccaacataccgttcgacctcatctttgatcaagtcaacaactggttcagggatcctagcgatgtgtgaatgaccaaggtcaatggtcagcttaggcttgaccacatctgtgacggcctcgctgcctgccagggaacgcttagtatcttgaataccactttcaacagcacgtcgtgctagatcaatggtttcctccgggctaagtgtttttgacccagtcggttgtttgctagtactctccgaggcatctcctaaagcagttccctcgtcaggatacggagagtcatcgcgtgatgacgccagaaagccagactccggtgttccattttccatttcatcttcgtctgtctcgccgcggttcaagcgctgcccacgtattgcgtcctcgggacgagtcatggtgggtgtcatggccgataaaagcccgaatgttgtcaaaaggcacacctcaagccagcaatttcgttgatgaattgataacctgccaagaactagaagaatatccaggtccagcgaccattcctatacagacacacttcgggcacctgcgcaaagcatcgttggttgtgattaagccggaggggcgggctatctcgacgttggacggggaacgtagctcgaggcggccgttagagtggattcggagcggaggaagagagatccgaatggtcaagtgcccaatgggctgggtaccaagtgttcgaacgcagggcagagttgttcaagaccggcgtaaacggtgcaatgaagccctttgacaatcgcgggcgcgataaagagattggccacgatggagatctggcaggtccaagaatgttgttatcgaagcaacaaacgtctcgagaaggctgacacggatagttaaaataaaatcgagtcttggtcctggaatgaaggaaattggggatattcaagttgggcgaggcaggaaatcttctgattgggcaaacaccggacctccgcaactctgcatccagactccgcctgcgtcactatattgaaattgaaatatcaaggatcatatttagggagagtttaggatctacgatgcatgttactagaacgagaagtgaattgaccaagaatgcatgtgctatcgtgtaaatagagctagggaagtacaacatccagagaatagatcaaataatatacataggccatcaataggaaagactagggatccaaaagcccctggaaaaggaggcatagcataatggcgttcgagcccacaccaacatctcagactcttacagagtgaccgtctctccttcttcgacctcggtctcacttgactcaacagtctctcccagatcaggcgcaccgctaagagctgatttccgctggtcctggaccagagatgtttcccgagcccaggcaacccatttgtcgtactgctcactctccatcttcataccaatttccatgtatgacggtccgaactctgcgccatatgctgcggcctcttccgcagccacccgtcgttgaatatcctcctgcaaccgaagtttgtagaattctcgacgagcaatatcgtaagcagtgctcttgttcatatccgggacgttattcaaaagccacagctgtcgctgaacaacactaataccagagaagtaatacattagcattggggggaagtttcacgtaagaaaaatcaagcattataagctaaaatattgggaacacacctttcaccatctaaccgctttcctggctgttggatgcggctccaatcatagtgttcaaagtccttgccagtgctctcaagaagcacacggggccgggcaagttcccagggatgatcgcggaagaattcagttcgcaaatggtcttcctcatatttgagctcgactggctggaaaagtcgactaggctttttgggctttctgcgcttctcttggacttggaagacgacctgcggcttcgacgacccagggaccgttttcaaccgctgctgaacaagctcatgctgaggaggacgtgtacgaatgagggtttcagcaggagggatctcgccgatcacattgacccattgtggcagtttgctggtctttccactggcgaattggttgagtgctgtctgccgcacccggagggctgtgaggtttattttgcccatggcagtcgggcaccgtcggtagctggaagagcttgaaatagaagaagaattgatagcgactggagacagcaaatcaagagacaagatatgcgctgcaggggacgaggtggttgatgcgggtgcgaaaagatgggattggcaaagcgcgtctccgattggtcgagggatgttctccgccagccagaaagtgcaggccgttcatcttcagaaaaacacacctacgtcttccgaatcttgaccctctccccctttgtctgcttttgcgcccagaaagtagacggctctctcttgtcgagtggcaaagggctctctcttggatgcggcgtacctaatgccacgatgtctgtcatctcatgcctcatccacataggtcccccagctcgccaagcctgcgaattcaccccaagcaggccttggatgagcttcctctctttcgacaaacctcaatgcctccctcgaacattcattctcatgcctcctcggtgcggagactctgtccccgtcgtcctcgcccgtccgtcgcgtcaatagcagatatttttgtcggctcgctgattctggcaagcttctgccacgaacactcgccgaatcgtcgggggttgtccacagtagcctggagggcctcagatcataattttcaaaaatttcagagcaaaggcgccactggtcgcagacagctaccaccccgacgacaaccagagtattcaagctcaaggtttcatctgtcgcaacccaaaagaatgatcagcaacggattggcacgtacgaatgacgataatacagaggagtataatattgagaacgaggaggcagagacagacaacgactatataccattgtggccagcaaagaatgcggacgcggaatcgcaaactcgttgtgaaagatttgattttacatatgatttcgaccgcagaatagagataacagaacaaacaaaaaccgacatcgaccccaaattgccggaaaaatacccccgccaatctttcccgtcatggctgcatcccgagaaggagaaacacctctctacctcggaactgtacgaaaggtccttggcagatcatgactgggaggaagcagtgaatgctgtagcgccatattcacgttacaaaaagacgcacagagatgagtcgcgcgatcaaatggaaatccactcggttgagaagcttgtcagaacgttatgggaagagccaaacccatccacccaatacctgtttcggttatacagagatcttcctgcgccgggcgtagctttactctcgaaacgcacccgcggtgctcttttgcgtttgttcgcacatccgcgagatcgacggtgggtagatgctcgtcgctacttggcattggtggacgacatggtaacagcccgacttcctctatcccgctcactctggtcttctgcgatacatctttctgggcgagccaacggcagagtcctgaaacgagatctcattcgagccgtgggcatgtggcagaagatggaacatgtcgctggagtaaaggctgacgaagtggtcttcaacatcctgttcgacattgcgatcaaagccggtgcattcaaagttgctgatcgcctagaggaggaaatgactgaacggggcctgagcttttcacggtgtggaaagacatccaaaatttattattttgggatgattcgggatgttgaaggtattcgagagacttttgacgactttgtgaaatcgggtgagatcgtcgatacagttgttatgaactgtctcattgcctcttttcttcgagctggcgagacccaaactgcggagcagctttacgcgcgcatgctggagaaacaatcaagcaataataagcgcgtttcgcattctcaaccggacgatggaatccactttcacattggcgggtctaatctgagctatgacatgccccaatatcgggaacgagcccgaaatttgggccgcatattgaagaagtcgtcagcactcaaagagaaatttccggaataccaccgtgctctccaagattctctctccattgcccccgacacgcgaactttttatatcttcctacgacactacgcctacaacactggccagcttgatagcttcatggctgtcatgcatgacatggaaaggacctttgctgtcccaccacgtgctataatctatttgttcctctttgaaggtttcgctattcatggtcggaggaagaagcagtggagtgcggaaaaccttcggctgacatggcatgcatatatccgggctctgcgcgactcgaatgcaagactccgtggactgaatttgaacaaccgaaagatgacgtgggagaacccactggctaagagcgtgacagtcgatgtcgaggagctaccagtgactgatgctcccaacgggttgtacatggcgttgccaacagcgaatgcagttgggaattcacagggatccgaggaaactgccgaaaactctactatggatgactctcaagacaatgaacaagactctaagcctgagctggatgaaaaggacgatgaatccacagaaatagaggaacttgatgtagatgaggtcttcaaccctcgcttgcagttctccggcgaggcagagcaagaggaattctgggaccccgagcagcgtctcgagaatggtctttttattggacgtcggatgatcatcactatcctgcaagcattcggaacatgttgtggccccaaagaggttcttgaggtgtggttgcaacttgagcggctttggcatccacagcagcgcaaatcgattgatgtttttgccgtcaaggaagagcttgataaacagatgtccagggatccacatcgggatcgctgaacaagaaagagaggcagctgaaatgtggatattcagcacttgtacattattttccatatagatctgccatataccgtcccgatttctagcgtgtcttttcgcaaatttattgtttgacatgaagaccatgtccatcttgtagaatttacctacctagtttcctacactgtcatcaagtcttggggcaaaaagcctcggggccaaatcgaatccaattgaagtccaatcccaaaagggaatcaaaaagtcaccacgtgacaccgcgttctaggacgcggctaaagactcaatcttcttcttctactgcacttactaccccttttaactaatctatctctgctatgaagcacaatggatcgtaatccggggcttacgcgccaaatttctaatatgcgatgggtcttgaaacataccttcaaaaagaatgatttccggtaagttgatgaactagggcagaggggtcaatttacttattctaccgcatagtccacttcaacgagaggtggtctcctccgtcatcgaaggacatgatgtcttccttcaagcatgcacttcgtttggaaaaagcatgtgttatcagctgcctgcagtgctcaaagattggggttgtgggttttcagcatatcttattttcaataacgaattagcctgacctcgatatctctagtgactgtcgtcgtttgtccacttctttcactaatggtgagtgtggttttggaacgtttgcaatcaaacagctaattcccacagacagatcaggtgaatacattaaaagctcttgatgtaccagtcgctacgatcaattccaatactactcatgaggagagacaacgagtttatgaggacatgctttgcggccacccgagtacacgcctgctttatgtcacgccggagttgtgccagacagacaacttccgccgccgccttcttatagttcacaagcaaggtcagctcatccgcgttgccattgatgaggcccattgcataagtgaatggggccatgacttccggccagcttacaaagagctgggctggttcagaaggaatcttgtcaatccgactgtcccaataactgcattgacagcgacagcaactccccgagttcgctcggacatgatcaacattctaggattggatcttgaaaccctccggctgttcaatactccgtcggaccgtccaaacattcactacgaggtacgatatctcgctgacttcgctggtgacaacgatagcgcagaagacagccagatacaaaacctgctcggatggcttaagggcatccaaacccgacgagaggcccgacttggcagcgaagcaacacggctccccccaatgtcaggaatcgtatatgtagggacccgagctatggctgaacatcttgccaaccggttatcctattcctcggactatatggtcacggcagtggcataccacgccggcgtggaagccagaaagcgcgcgcacattcaatcaacgtggaagtcttctcagccgttccagccagctggagggggaaggacgccggtcttctctattattgtggcaaccaatgctttcggtatgggaatcgataatccagatgtccgctttgtcgtgcattggacaccaccgcgaagctttgaaagctttgttcaagagtcaggacgtgcaggtcgagacggccgagccgccgcctcactcgtctactacggaattcaagagaggaacttcatagagaacatgatctaccgtgatagtgaatctcaccgtgcgcaggcccctgaaaatcgagatgccaagcttgaaagcttcggcaaggtcattcggtactgtgagagtattaggaggtgtagacatgaactgatcaaagagttctttggtgactttgaattagaagaaatgggatcacaactgccggccagggagggtgtgcctgttacgagctcatccccttgcgacttcgcctgcgatttttgcaaagagggtcgtgccgggttggcaaagcgccgggaaaaaatggcatctgagactcagatggctctcctatacgcggatttcgactgaggaaatcatcgtctatttgattgtgctgcgtggtttagggttttatctttttttttttcttgtcgtctggttctgcttgcatttctgaggcgccaacagcatgaagggtgcagggagggagttcttttatacttcccatatagcacagagacaaagacatggatggaatccagcatccgagctgctcggcaattagtgttcgcttctaaagagtttagccacagcaataaatccactgtcaataagcaagccttttattatgaacacaattatggagtttaccgagtttaccgagtatggaaataggtaaatcaaagggttagacacaaggcaactgctagactttctttagcaaagacaaagagatgagaaagagatcggtgaaaatagatcgctagatcaccctcgtttttgcaaacgaccaggacaggcttttgtgtgccatatgcgagatagattgcgcatggacagcggaaggcacaacgggcacaatactaacccactagaacaggttctagcttaaagaccggggggcgggggaacctgtaattcatgtatcagcattcagaactagcatagttgacattcgagcaacgtaccgcgctgtagctgccacctgcaccaggcggaggcggcggggatcccgagccaggaggtggggcaggggtctcgctggccggagcagtaggcggagcactgccatctgcctgctgctgctgttgggcggcggccatctgctgatagtactggcagtaagcgacgtagttctggtatccaccgtagggagcatatgggtcagtggtgccgtagtactgggcgtactgagcactgtagtcagcggcagtgggggtggcagcagcgctcggggaagcagcagcagcagcctggcctgcagggctagcagagggattattatgctgctggcgattgttgtagccaccgccgtagccaccaccaccaccaccttggtagcgatcaccacgatcaccacgatcaccaccgcggtatccaccgtagttgtgctggggtgggttctccttgaaacgttggtactgttcctttacattggttaggagatcctcgcacagctcctttgcctgctggacatcgttggcatcaggaccacttgaaagactgttagtaggagctcataatataagtgagcgaggcagaaacaagcgggaaataaagtcagtaagagaataatgacaactcacgccacatggaggaacatcggttcgtcgctttcacggccagtgctggattcgatgaagccagagccacgacccttgatctggacacggcaacgagtctgctgttggatgtgcttcacataagcaccgccctgtccaacgacctgagcgcgcaagttgaaaccgggaattggctcaagatcgatgggaatgcgctcatccggccatttgcgctgcgtcaaattagccaaatcattatattaacgaagtcgaaaggaacagtcccatacacggccatactcatcccgctcaacctgctgctcgggctcccggcggcggaaacgtcgctcgtcaaccaggttcggaagttccttttgcatcaggtcattaatcatagtgactgctttctccagaccttccttgttggtgctggtcacatgtaggtaaaggggagggctctagaacggagtaatcagcacttgatctcgcgaatcttaggaagacattccttactgctgcagtcgccatgttcttgtcagggtaatagtttcctcgggttgtcacatcttgagggagagaaaaagtgagtgagaccttctttgcctaaagttcaaaatataaaggaagtcgtaccggcgccggtttcatcttgaatctataagtcacgcagcggaggttagcagatgcaatagagggtgaattggaagctatgaagggtaagcttcatccagtccgaaagaagaaagcagaacgatgagaaagcaatgttcggagtaccccaatcttctaggcggaacatgactggaatatcagcaagtgacaaaggggataattaccatcttctgagtagaccccttcgtcagggtgtagcgattgcgcaggtcattgatctcaatgtccttgatgtagtctccatctgcgacatagatttcggcattcaacttcgctgcgccttcggcggagggtgactgggaattctctgtcgcgttgtcggcctgttcgacgatgttaggaggtgggtagaacgaatcgaagtgggtgtatattcacagaacgaattggagggacatcaacgtgttgaatggcctttttcgcctgaagctgcgcattaatcttggctgctgctgccgctatagagaccacaataattagccaaatgatctcatttataacaatatatgaacctagatgtaacgaacctgcggctgcagccggatccacgacaggtggctttgctggagtatctgcgccagggctgcgactcagagtgcgactcagcgggcgactcagcgggctacgagtgcgggccgactccgactgtctgttggacggagatcgagagcgttgatcaaaacgggatcgccggggctcaggctcggtttgatcgaagcgagaacgcttgactcgatgttcatcgtccgccatgacgaaagttggggtaaggtgaaaaggaagaggaagtcgggggaaagaagctcaaaggtgcgcgaaggagtttgggaggcgaaagccaagccaccaacaaacaaggccaccaagacaaaattaaggaagttttgagtagctgataagctcagaatactcagaagagctaataatattatatattcttcatttccaaggactgttggtgttttctagcgaggcatgttgaagattgaaggtcacgtggtgggaatcacgtggttttaatcacgtggttttataaccggcagatgtactacaccgctttaagtctagcttactatgagtcagcgggcggtcgccgagatcggccgattcaaaagaatataccccgggcggatctggagtgaatcatcgcacaactcattcacattacttgaactcctcatggctttcaggcgtcctttgacgctgtccctagggtcagcgtcgctgcagtcatctgctacagctgctgcccgatcccgcgttgctgcgcttcctcgattcacctctattcgtgcgtcgtcaagctcaacttcagctcttgcctacaaggcattgcaccgtcggtcacctctgcctttgccggtctccgatgcctcccctcaatgggatgctccgaccgctgtctcctctattctctatgagactcccatgccgccctcaaacccacctaagcggcacatcctgaactgccttgtgcagaatgagcccggtgtgctgtcccgtgtgtctggtatcttggccgcccgcggcttcaacatcgatagtctagttgtgtgcaacaccgaggttgaggatctctcgcgcatgactatcgtgttgcagggccaggatggtgtcgtcgagcaggctcgccgccagcttgatgacctcgtccccgtctgggctgtgttagactacaccgactccgctcttgtgcagcgtgagcttctcctggctaaggtctctatccttggccccgagttcttcgaggagctgctccagcaccaccgcgagatgaccacctcgccagactctccggaccacaagcacgccagccttgaccacaccgcccagcaataccacccccgtcaccttcccccgagtcaggctctgcgtcacaagcatgagcacttggatgccattacccgcctgactcaccagttcggtggtaagatcctggatattagcaccaacaactgcattgtcgaggtgtaagtatattctctatcctgactcaggctttttgataaaaactgactcattcgacctcctacagctctgccaagccttcccgtatcgactctttccttaagctgatcggccccttcggtattctcgagtccacccggaccggtctaatggcccttccccgctctcctttgggtgagcccagcgaggagatcgagaaggaagctgccgacgttgtcgatgccagcaccctgccccctggctaagctatatcaaatttccacctcaaaacatcacatacccgaattggattggattggtctcttggctttgtgtatcttctatttttctggagttgacctaatttcaaaataaatggctcatccattgtatgtaaaatgacaacaaatattgtttctttcgcattttaatattccttgcttttttcctcaactgcaacttgctacttcgacttattcatcaacatcgtattcccatcttgccatcctagaccggagattacaggtgctcccaatagcctttcgggttatcattaagaaatcatttgtagcaatgtaggttaatggcgtttaatcgggggttctatattggttatagtttctacctgcagtctatagtgataccatgtagcacaagcaaatatatataaacgataaacgatacacgaatccatgtgaaagaagtttcatctaactgcttacaactgatcagatttaggattgtcaggaagccttctagcgtgcatgtttacaatataatgtctgttctgcagttcataatgtcacccatgtactacataggcagataatatataaagcctactatatgctacttgtggcaacgacccaaaacatatggtattacacggttggagaataatatgaaaaaagaaaatgtgaaaggagagaggagggtatcccaaataagaagcaggaggaagtgaagaatagcccatgtcttaggacatatctcaagaaaggatgagacggcgctggaacgagcgcgcaagctcagatagatcagatcttacactgatcgcggcaatttacctgaaatttctttttttcactttttttgcctttcttcactgggtgtccagataggacttgcgaggtattacccgctcagccaagtcctacctggacaagaatataggccttggtcttttacttattggaaccataggagtccttggggcttgtatatgcttctatttctacttttattcttggttttacttggtttgcaccttttgatgtaggctgagacaaaaaaacgccgggcattaattcaatcgagcaaattccctatgcatcaatcatccaaatattataggcacatgggcattgccgatccagcagcaataatcacaaaacaagaccaagcaagaccttcattatacaggtcgcggcagctttacatcatcaacacaacactctcgcggcctagaacctcactctagccgaaattccttttccatgatagaaaatgatatccatgtagttgccaatcagcactccgaccttagcgacagcatccatctccaacgactgaccaagggccttgcgcagggcgtcataaccaaccccacccatatcaagatcaactggcaagcgtgggctcttggagataccaggaggcaccgcaaagggatcacggttattaatccggccgattggctcattttcctcatagaaagccgttgcgtcgattgaggtgattagaacattgctctccgttagaggtgaggaaagggtgaattctgccgtggaggaccagagatagaactatatttatgagtaaataagtgttagtagcaagtttctcctctctggatagggacatggtatgagtagaaggggcatgtaccgttgcatcttggataaaatgaggcttgttgtcatcatcatcgctgcctggggaacccggaatagatatgcgagggataggaacagtgatcttgaggactgataatgcttcgcccaggtttggtagagatggaatcgtgtttcgatagctcttgatggtgattgttgtattcaagcctgagtgaaaaaaaccatcagcataatttaccattttcatacctagaaggacctgacctgatacataggatgaaagcagcgcccgccctgcctcaacgccatctgctccagcttcgtccaacggacaccaaaagaagtcgacgggcacataactgttgttaccaggcccaacagagatattatgagcggtgaggtgggctacaacagtgtcattgtagagtacaagaaggtcaacgaaggggactgtagccgagtaattcgttggattagtaaagttcgcctgcgcagacaccaacatcgaaaattcagtcgtgtctcctagttgtaatgagacgatgcgtggattgaggtggtcaagtgagttgccgatggaagctatgacatggtcaatggccaaaatattcttgatttgtactaagatcttctaattcatgagaacatactcttcacgggtacctccccttccgcaggaatccctcgcaaggcgaagcggcccaaaccagttgagacctttgtgtctacgctggcagcaacccggagcacgactgtttcgctaccgaacagcattgcttggatgacttctgccaaaagttcatcatctgtgacttctaatggtgcatccttgattgcaaactccacaaggagtgcagaggagccatcttgatcatccaccaatgtggagttggcgccttgccagtggctgatattcaacacaccgaacttctcttccttgtagtagacatctgcaagggcacgaacttgcgggacttcgatttggaaattcatctcctctggcagagcaataagaaccttcactagagcagacactgtgggttgtgagtctggagaatctggctctgcgaaagggttaggaagggagaaatgtgtatcggacatcgtgaagttcttcacgaggttgtccagcgcatgtcccgtaaatggaagaggcatagtcacgctgcgcagtagattgacaatccaagccggggtactgagtgatggtgcatcagacccacggatgtagatagttgtttcgagaccttgcataaagctcgaaactaaaagatccagaggagaaccctcccgtcctgggcaggtagaggtcaattcatcgggtaatcgttggatgaaaccatcaacgccgactgcggtcatctggccaggctgaacgtctatcgtacttgtcttcgcctcggcaaccagaatataaggatccccgggtgaacagttcggcacaagaatatcaaatccgagggcaggaacagtgagagcgacaggagaatcaatcgaagatgaaagtaagacatccactgccatgccaccactgcttgcatcacgcgcattcagcttgagaatattgatccttggcagaacagggaaatcatgttctgggaagggtcagcttatattgtccagtagtaaaaagaaaaacaaatacactataccttcaatgatgacattgtgtgttaggacttgagttcccaaagcgaacaagcctgacttgagatgcattgtcgccttgcccttaacactaaggcggcccaatcttccctcaatccaatcaagagctatcgcgtggattcctcgaatgtcacccgcctctagatcggtgaggaagtcgacattggtatgacggccgttgcggatgtccactttgatggaaggcaatgctgcgtttccaacaagcacattcccatattctgggagataaacttcgacatttgatggacccgtctcaacttccctggctatccatgtcgccagtcgaccaatgcctcgaaccgacttattcttcacgcggcccgagtccatcataaagtcgccctgaatccgggctcgaacgccgtcagatgttgtagaatcgattgatactgcggtcggtttgaagacagcggcttcttgcgcatattctttgacggctgcgggagcagcaaaggcaaataccagtatcgtcaaaacgctgattgttagaatagagagagagatgaccgtcggccatggtacacggccccgcttcttgacggcgccaccctcgggcgggttctgtgatgcgaatgacggggatcgcagcgatccttgttcggtcccgtataccaattcatcagcatcacggcggtgcaatagaggtgttgattctgatgataattcatatgatggcctaggctcgtcgacggatgttcgctccgaaggccgtgtaatagggctggactgctcctccaacagacgtgggttcgaatctgccatggtggcctcgtctgaatgagatggtgatatttgcgaaatatgggatgactctgttgataattgatatgatggcctgggctgatcgtcggagcccaactgcttagctggcagaggccggtttgcctcgtcagccatcgtggccctaaacgtatagataaatcacaatgaattgtagtatccggagccaatatcagctatatgaaatggatgaatccagaaccacgtaacagaaagaagagagaggcaagatataaccttggaagaggccctcgatgacgataagccgatgataacggaaccttgggatgcccaggtgtggagagctgacaccttgacacctgacatatcgggccgcaaggcatcaatcccctcgcacatccactctctattaatttattgagtcatggttcttcacttttagggctcccccgttcctattcccttcccacgttccaactcctcatcaataacgcccagctcatcatggctagtggtctcacagctgccgcccgttatggtgcccaaagtgtaaaccaattggccggctccacctcatctttgcgtcgaacactccaggctaatggaatccgacgatttgcccaccagacaccgactttacctcccacctctcctttcgcccctcgtcatcttctctccattgcagacctgacccctacggaattcgcgaccctggtccgcaatgctgcgtcgcacaagcgtgctatcaagtccggggccattcccgaaagcctattgggatctctctccggcaagaccgtggccatgatgttcaacaagcgcagtactcgcactcgtgtatccaccgaagccgccgccgtccagatgggtggccaccccatgttcctcggaaaggatgacatccagcttggtgtcaacgagtcgctatacgatacctccgttgtgatttcctccatggtctcgtgcattgtcgcacgtgtcgccaagcacgaggacgtcgcaggtctggcacaacactccaccgtacctgtgattaatgcactttgcgactccttccaccctctccagatcatcgccgacttcttgaccatccacgagaacttcccggcccacgcgcacaagctctccggcctgggcctggagggtcttaagatcgcttgggttggtgatgcgaacaacgttctgttcgatctggccattggtgctactaagatgggtgtggacgtggctgttgctactcctaagggctacgagatccctgcgcatatgattgacatcatccaacgcgctggtgagggagttgacaaggctggcaagctcacccagaccaatgtccccgaggaagccgtcaagaacgccgacatcctggttacggatacctgggtctccatgggccaggaggaggagtctaagaagcgcatgagggcctttgagggcttccagatcactgctgatttggctaagcgcggtggcgctaaggagggctggaagttcatgcactgcctaccccgtcaccccgaggaagtggatgatgaggtcttctacggcccgcgctctctggtcttccctgaagccgaaaatcggctgtgggcggctattgccgccttggaaggctttgttgtaaacaagggaaaaattgtggagtaaaagccggttaattatggagtccattcaaacatgccgagaagctttacccggccaatgacagacatgatgatttgatatagcggagttgccgatgccgagggttctctgttgccgccgagccaatcaaaagatgatccgacggcctggggatttcggatatggctcctccaaaatagcgggggcttccgattctgagacctgactctattctgttcttcgcagatcatccggaattgactattgtataatatcctacggagtactttgctactagttgccagcgatctgaaatttacagggctatatcaagacattccacctcgggggttgattcatagtactgaatccggcatcactgtaagtgatataaagcagaataccaacggttgaaagcccccaaagctgtatatttccaaaccgattcttgagatttggtaaatacccctggagggtatggactccacatggaactcgggagacctgaagtggaatctcggaatcgttgctcaccccacatttactccacgctccgaagagcatctccaagacgtttgatcgggtaatgcttcgcaggggaagacacattaagcttgcttaagaacctgagtatcgcttatcattcattcctcgaataatacctctgttttcagtacccccaaatttcttccacatctcattatcaacatctcccccacatcacaatgggcttcgaagacaagcgagtcgcaatcgtcggcggcggcctagggggcatgtcctttctcaatgccgcactgtacagcggtctgaagaacgtgcagctatacgagcaagctgcacagttcggtgaggtcggtgccggcgtaaatattacctcgaacgcaaaccgcgttctggatgccttcggtctgcaagagagtatgatgcggaagtcctcccgcaagctgcctagctacatggaataccaaaactacaagactggggagtacataggtcacattgctgaattctcgcagccccacgcgcgcctgctacaccgcgcccacctactggactcgctgaaggagcgcgtgcccgagtccagcctgaatctgggtaagcacctggtatccgtcgaccgcaacactgccgccggtgctgcaccgtatacacttcgtttccaggatgacagcaccgccgaggctgatattgtcatcggctgtgatggtatcaagtctaatgtgcgccgggatatgggcctaggagacgaccccaactactctggccaggtggtctatcgtggattcgtcgactacaaggacctacccactgagacggcacagctactgcgcaagactgttaacttccgtggacccaagcgccatgtcctaatcttgcctattggtaaccaggagacggggaccgaccgtgctgccatcatcgggtttatgtccgagccgcttgatgcatgggattctgagagctggatgtcccgctcggatattgatagtctccaggagcatgtccgtgactggtgcccagaggtgcagcacatcatcgctggtctgcgcaagagctccgaggacggcaagatgctcaaacaggcgctgtacgtgcgtgacccgatcgaaaaatggtatgagatgaagagtgggcagaaagatgctggtattatcctgcttggtgactcggcgcactcgacccttcctcatcaaggtacgttgcatcctatctgtgtctagtcttattgcggggcatgtattaatagtactcgataggtcaaggaacatgcatggcaatcgaatccggcattgcccttgcaacaattctcagacactggaagacagacgacctagagactgcattcaagttctaccaggacctgcgcaagccccggacagaccgggtcacaaagacaagctacgaagccggcaagttggctagctcagactcccccgaccagatgtccaacaacttcaacccggatgcattgacggagcgcatgaagtggattatggagtacaatgttctagaagacttgaagatcaagggtcagggatatttggacttgcaggattcgcgcctgtaggcggtactgatatatgtcgacatactcctgtgtatgctttttttattttgtagaaacaaataaacctctctgaattttcctacttctgttcgactgcaccaaatgagcattcatcatgccacagttgttaatcgtatgatttgactacacaactcgcaatgttggacgatttctatagatccgtcatacatcggtcattccatctcactcggcttatttacattcaacaccattccaataatatatctcaagatcctatctcttgataacatttctatcctcgggcataataacttcaagacaattgccggggccgaccatcttcacatgtcagccgcacgtgcagcaactccgcatctccatcgtctcgacctcttcacatctgattctgattgtgcttgagctttcgactggaaaacccatgatggaggtaaatactatattctgacctgcacaaaatttgaagtggatatctaacggggcatatatagttcaccactaactcgggaggcttccagtcccgtcgatcatacccatccctccgccatatctctatagcacccttaaccccacgattccctattgatgacgacacagacctaacagactacttcaaccactccgaccatgaaaatccagccagcggcagccgcacacccccagcatcatcctatatatctagcgtctcagtcccaagcacgccaccgatcctctcccactcacgcagcaactcgcgaaaccgtcacacgctcagcaaaagctccacagggagagtagccttaagcgacacgaacctacacagtcgggacctaggctacgccctccaccacattccaaacacgcacaaaaaacagcccagcatctcatactcgcaaggacgacgtcccctcccagacaacacgccgaaccccaaatccgacgcagaatggatactgcgcgccggcattgccctggcctcctcgacccgcgaggaaaaaggccagagctggctctccaagcgcgagtcctctacaagcctcgtcccagacacggccttggacgaaatactcactaaacgccaccaccaccgcaccaaatcaggcgcctcgtcacacatttcacgctccggcgcctcaaccccaggcggagccggtgctttctcccggcgtacctcccgctcccgcgccggcagcagacccggcagcaacagagtccatctaaccatgaccaccatcccggctacctccccgaccacagcagagaaggaagtgtccttcagctcgggcacgaataccggcacggcgagccccgaagcgcgcggccgtatgcctgccctagttcctgacttcgtggacgcgcgaatccgtgcggagatggcatcgctacggcactgcgagcggtcatacccggacgaagactctgtgtactgggatggggcgggctccgaattcgactcggctttgtcagagtactcgttcgactccgacgagatgccggatgacttcgatgaggcggatctgcagcggctgacgcgcgagcgcgggttcgggctcggcacttggattgaccggttggtcgagtggacgcttttcggggttgatgagtggcctgcggctggtccggctgtggaggctgcttcgcgcattggttcggcggatactactactactgttacattcgaggagcctgttttgatggctgggcgggatgatgatacgatttcgcttggttcggttcgggatgcggatttatcggatgatggggagggttctattggcagtgctgcttctattgagaagcctgggagtcagggggggtgggaggatgctgggtggttgattcgtttgatgaagagggctttggtataaaatgtgaattgcattgagcgatgttcttgattgggatggttgtctatccataatgtttcgttttgtttagcttgctctttgtaattggttattagctttgttgttcagaatatctatgaagctggctacacatgaccaagcaaaagccctaagatactagagaaatgtcccggttttacatctttctactgatgaacaaaggctccgagaaaattgataggattccaatgaacaagctagcgtgaataaaggccactaaccaacaacatatttagaatcctgcgcgaacaacaggaccagaatgtaagttgcagaatgagttggatggcgagtggcccttttctaatgtatagaataggttcaaatctccgccgacttttccaaagcttaaaagcgcaagaattggagttaatggcccaagacagaagttgccgctctgacacgcatcattggaatatgcgatggacataatggcacaagcaatagagattgagtcaaagccccaaaagtgaaacagacaaagacaacccacaacagcgaaggagaagcaaaagacaaacaatgagacatgaatgaaatgaaaaaaagagaaatgtatgcgacaccagggcgccagtacagatagaaagagagtaacagagttggaatgagtacacaggtggaataattcgagaatccgacagaaaggaaagggggaaggaagggtcttgcgtatacataggaatacgacaagttggcaaagtaagcaagaaagaaatataccgaggcccagttcgttcattaaaagatttgagaacaaacaagctaccacagcattcatcttccaaagtcccagccgaaaaagaagaacaaagaaaatgctgttaggttatccgccttgagtactataacgccatcggaccaggagtctagggtcatgcagcaggtatcgtgatcgtgacatacgtcgaaaattgcgcggtcaaaggggtatggaccgtcggtcaagctcaaatgagagccggcatgaatggggggacgtgaggccgacacgtaagagcggtgtaaatgtaatggtggtctttcgtaaggaaatcggagtggtgtgattcatcaccaaggtccgaccttgactggtgttcccagcccgtaagttccggaaaagagctgatcccgtatagagcccatgtcgccgttggttccgtgggatggtgtgtcaggtccattcatccatcccaagctgagaccgagttcgttgacagctccctgtagctttcctccagaggtttggttgtgcttggccaacttttgatcccaacctccatattgcaattggatgccaccacctctttttgccgcttcccggatgaccaaaatccatgccttgcacatctcgtcataagctgagtctcgttcaatgttgttctgtggcgtgctccagcgaggcaaggcatgaatgatgtcagttgccccatctaggtagctcagggatgtggatgcttgtgattcgtttgggggaaggaagttaggtgtgaagtcactcaaggcgtcaagaaggttggtgagcggctgtcggactcgattgtatgcgtagtccgattcggtgttgccacccaacgggaatgacgactggagggcggcctgatagttccgaaggacttggagagttgaggatacattcggacgtggggatgtgtgcacaacctcatcgacgagttgagggtgacgctcgcacatggtccgtacaacagtccgcaaggcatctgtatcgagggtctctagcagacggggcagagatagaggtcggcctgaaacgttcggtcgggaacgtttgatgttacggtagctgtgaggtagttgtcgaggagtggcggcgggagagtttgtaggcgaagcagacatgcgtccatcatgatcattgtcgtcgtcggctttccgtttacgactggcatacgacgaagagggtgtagacactggccgttctgtcagtacacgaatgcatcaaagaagaaccacctctaaaccggacagagaaaacaaatcattccaaggggaagggatatcttactcatacgggaaggagagaatcgggagttctcgtagaagtgaggaggaacaggaggtgtggccaccaagctgttcatggtgacagccagatggcaaagaataaatgagacggtccaaaggactcggatatccaaaggagtgaaaaagaaacagcaataggcaaccttgaagaagaagaggatatgtaatgggttttgaggtggggagagaagggcagagaaaggtagcggtggagaaaaagtaggccgttgcaggtggcaacgcactccctttgcgcagcttttggagatctgtgcccttgaaagagatttgacgtggactggagaagggcttcgtatatttttgaatgattcttataagaaactaaatgtcttatatcgttctctttgctgtcatcggatgtccactgttttcgggtgctatacgaatacccgcatcatctacatctacgttatacgtaatagaaaaagactaaaaagaaaattgtgggtaatcctattctttggactccagcggtcataaaagggatatcgtttctacaagtacagggactgggcagcaacaatgtcacggcggaccttgcccagggcctcctcgaacttgctctccaggtcctcgctgcccatcaccttggcagcttgcgccatctgccgtaaacactcttccaatcgacggaagacacggatcaagctaccctcataaacatcggtcattttactaggatagttagtatactgctaaaataattgaaagagggggatgcttaccagatatctgcgaaagacttgccctgagtccactcgtagaccacctccatcagctcccagtggaagctctgaacgtactcatcctcgttcacggccatcttagactcctgcgacaccttggcaatgatgcgggcctgtgattggatctccttcagtggcttcgccaactcatcgttgttcatagtaggggcgtccttgaccttttcttcgaacacgaaacaactcatgacggaagcgacttgctcagcagtcaagttgttaaagaaaccattgaacagcaactcgctcagcatcagttcgtcacctgtactaatctcacatgcaacacgagcctttaactgcacgacttcggcttcgttgataaatccaaaacgacggagcacacgcttgcgattcttcagctcatcaagctgcaaaaccgacatggcctctgtaatttccttctttatcgccttcatctttgcagtcagttccacctttgcggcatattgctcgtataattcagtcaaccgaggcgaattgtgcaaaggattactcagaaggcgagactcaagaacctcgattttctgtcatatggttagcaacgtgaatcatgtcttagagcaacaaaatcccctcttacccgcagtagcttcttgaagctttcatccttgatctgcatattctcaatcggatcaagcagcggaataccatctgggaaccgcctcttaacttcatcaatagatttcataacatcattccgagagccaggcgacgtgatatcattgggaagcatgacgcgaatgtgagaaatttccttgatgcagctcagcacaattggcactacctcactgcgagagggttccccttcctttggagggtgaacacccggcggaagatcttggaaagacttggtcccaatggatgacccttccgttattctcaccaagacatcaacgatgtaagattggtgaggactcaatttctcgctgtcattgttcgcttgcttccgcttcttctggttgatcaccacgccccagccgaaatcagcatccttgtactttacatggatcaatcgtccagggtgaatgaaattcaaagaataattggggtgggtaatgacatgctgaacatcgtcggcaaatgcatccagttgtttccgtaggtcgtagtattcgcggatggtcccctcgtctgagatgatcatattggcgcgcttctcctcgagactatgaagctccttctccatacctgaaacacttccagtattctggaactgcttgaagcatcgttcaagcatgtattcgggcgagataccctccacacgcatcaaattgagaatcatgttgtagccaagatggaatgcggaattgagtcgatcctgttcaccacgcacgatctccttggcgactgctgggtccatctcctctccgaccatcatgatcacaatacctcggtcatcgagacctcgacgaccagcccgaccagacatctgaatgaattcagatggggtaacccagcgttggctagttccgtcgaatttgcggacactggtgaagactacagtctttgcaggcatgttgagaccaatggagaaagtctcggttgcaaacaggactttgatgagaccctcctggaacagaatctcaatggtttccttaagaattggcagcaatcctgagtgatggacaccaataccctgttgcaaaagtggaaggatattttggatctgtggcaattgacgatcctctggagacaacatctcgatggcgctttcgaagactttggacaccatatttttttcggaatcatcgttgaaagttagtttgctcatctgtaaagcacctgcttcacactcccgcttgctgaagctgaagacaatgacggggttgtagttcttgagcatgatcatcctgacgatcttgaagatatcagatgggcccttgtttccacccttgttgatttgcttatccttgcccctgcccttgcgtttggctaaagcgtcagccgggtcatctcctttcttgtccgaaatcgcgctcattgctttctggaaattctcctcgcggaaaactcccttttcatccacgatgagatggataccctctccaccagcggggaagaagtaattctggagtggagtcggacgatagttggtgtacacaacgtgacagggctggttatgcatcttcacgatccattcggcaaattgcatggcattcgggatggtggcggacaggaaaacatagcggactttatcgggtaacaaaatgatagtctcttcccaaacaacaccacgattcaggtctcgcatgtagtgaatttcatcaaaaattacccactgaacttcacgcataatctcagaaccacggtacaacatggagcgaagaatctctgtggtcataacaagacatgtggcagtggggttgatggtcacatcaccggtcatcagaccgacatcgccgaactccgcagcgaattcacggtacttctgattgctgagcgccttgatgggactggtgtagataactcgctggttttgtttcaaactttgcgcaatcgcatattctgccaccacggtctttccagcactggtatgagctgataccagcacactctcctcccgctggattgaagaaactgcgacctgctggaaaggatcgagtgtgaagggccatgtctttgcggggttcgccggaggcttatgctgagaaataggcacataagggtagtttggcgggattgcgacttgatggcgcacttgatgagacaccacaagagaagaagtgcctgcagcacctgaaagtcctgcagaggctgtgatttcgcgctcttgctcggtttcgaaagaatcggcgacgattggctcgggttcctgatccaatcgaggtcgcttcgtctcaggttgctctagttcggacggggtcgcagggggctcggcttctgctgagtcaatttccgcagcaggtgcatcggacatcgcaacatcctctttctgttcaggctcggcatctgcagttttcttcacagctccattcacctgtctttttttgttcttatctttcttcaagcgcttgggggcatcctctgacggttttaccgcctgaggttggtcctcaaagacatcaaagagctcatccatctccagcggttgggattggtgaatcaaccacaggaggagaatgagcggcgtaggtaaccggcctggactttttctggttgagaaatttaaaagttccatccatatggggcaagcggtgggggcgatcccgagcaaaagacgctaaacccgattgaatgaagtcaaatcacgtgattagcgatcatcccattccgcacctcgagatgttcccttcggcttcgtccgtacctttccgatcgtctaccctctcctctctgtaactcaaggttagtaccccccaccggaaatacaaccattcctctcgccgacgcttgaatttcagatgtactcctccgctatccgggccagaatggccacctccttcgctgcccgtcgtggcttctccaccactcgcacccagcttgctagcccctaccactacgccgagggtcctcgctccaacatccccttcaacccgctcaccaagtacttcttcttgcgctactggagcttcatgagttagtggtccccaacttacatatgcgcagtgccatgactaactcggacatcatctagttgccggattcggtgctcccttcgccattgccggtgagctataccccctctctacgattctaagccttaagcatactctaacatctctttctactagtctggcaaacctacaagaccaaataaattgccctttgcactgtacttttcttgcgatagcagtctgggcaactaggtggttgaaatcttggatcggggttgaagcagaggcggataccatgtacaaagctagagattattacggaaaattggttccgcctgttaccgaccccattgtaattgtgtagatgtcgaaatgtgtagcttaaaaggacgttgaaatatggatgaagtcattggctgagccgctgtggaaaaccaaaaaaatctcttggtcggcgcgattcatatatcagtactcacgaacacaaccactcgcaaacaacgtgacagttactgtcaacgaagaagaaagctggtctctgaaacttaactttcctcgctattgtttaaattccatacatttactcccttgatcgcttcatggcggggtaaaaaaagaagcataaaaaacttacccgttcctggaagatgcgcaatttaagaagtatccgtctcgctgagacggaaattgagagcgaactgcctctcacagctacagcatgggatactgcttcagactcggtggtgtgcacctttggtccggccgagaacaatgcaatcattgaggttagacgaaaacgccccgagatcacttcaacagatccactgtctcccgaggcttttgagtgtattgcttcctgggatgctccgtgcccgctgccggacctggcatgtgatcgtgtactcgccctgcattactttgcggataacctgacaacctgtctggtgttggaaggaggtgatattatcgttgttcgcgaagagccacttgccggcgaagacaagattgaaatcgtcggctcagtcgatgtgggaatcacggctgcagcatggtcaccagatgaggaaatgctggctctcaccaccagagcccagacgttcttgtatatgaccagagactttgagaatgtggccgatattactttcgcccacagtgacctgcaatcatcacagcatgtgtcagtgggatggggtaaaaaagaaactcagtttcaaggaaagagagccaaagctcttcgagacccaactgtaccggaaaagatcgaccaaggaattttgagtagtcaagatgatggtagcactacaatcagctggcgaggggatggggcgtatgttgctgtgaacagcatcgaagcagatactcgccgtgtgatcagggtgtactcgagagagggcactttggagagtgtgagcgaacctgttgacggtttggaaggcgcattgagctggcggccatctggcagcttgattgctggaattcaacgactcgaaaatcgggtcgatgtggtgttcttcgagaaaaacggactccgccacggcgagttctctcttcgtctgtccgatgaggagatgaaatcatgggcttctcgcatccacctttcttggaatgttgattctactgtacttgctgtcaagttccaggaccgtgtacagttctggacaacgggcaactaccattggtatttgaagcaagagatccctatcactgttgatacaaattcttcgcttccatattctttcgaatggcatcaagagaagacattgcgattggtcgctggctcctcaggtatgctatccttgcatgaagaacagagcaagaataaaagctgatctaaacagtctcgatactggacgcggattatgtgtttgatatcaaccatggatctacctccattccggatgatgttggcgctgttgcagtcatcgacgggagtaagtatccagtcagacctgatttgaaacattactgattcacctattagaaactctcaaattgaccccgttgcgaatggctggagtaccgcctcccatggctcacaacgagctgactttagagtccaaagccattgatgttgcattcagtaaatccggatcccgtattgctgtcctgacgagcaacacactctccgtttatctctggtctctgaagagccgacccgttcctgttcctatcctcgagtcaagctacccgttatcagatgccccagccagtcgaccccggcagattgcattcttgaatgagaatgaggtatatgttctcagggacaatggaccgaactcaagccatatcgagaggacgatgctagacacccgaaccaccgagtctgtatatcaggctgtagactccgagcaactggcatcgatcttcgccggtattggacaccaagctctgtggttctcacatgcccgccaaccagcccatcctgtcagctattcgagtgttgaagaatcttcatcgggaaatcttgatattgcttcatggggtgagagccccagtgttgacagccattgggcccgtgttgtctctatctctgagcatgaggtaagtctatattcgctttttatttggagctttgtgctgatttcgatagcgcgttttgattgcaatgacgagaactggcaccttgtatgctaacaagcgagtccttgcgaggaactgcacgtccttcctcgtgaccccatctcatcttctattcaccacatcggcacatcttctgaagtttgttcatttgaaccacgttgacggtaagattgatttcttggacgtctaagtcttcataagctaacatagggattgcagaaatggaagttcccgaggatacaccagaaaccgatgaacggtgcagaagtattgaacgtggctctcggttggtttcggtgataccgtcgattttcgcagtcgtacttcaagctcctcgagggaacattgagaccatcttccctcgcgctctagtattggctggaatccgtaccttcattgaccagaagaaataccggtctgccttccttgcatgtcgcagtcaaatggtggatctaaacattctccatgattacgctcctgaacaattcatggaaaacatcactctgtttattgatcaagtcaagaagattgagttcattgatgatttcctatcacgcctgtcgtacgtcaatatccagtcttataagaaactattttactaacgttcacatagggaggacgatgtgtcacagacactgtacaaagacacgctgaaaatatccaagaacgtatcggcagctgtcgcccagccggatggaccagcagttccctcggtgcccaaaaatggcaaaaaggagagcaaaatcaacaaaatatgtggtgcattcctagccgctctccaaaaccgtgtagataccaatttgcagaatctgatcacggcgcatgtttgcaaatcaccgcctgacatggaggcaggactgggacttgctgcaggactaagaagtaagtactcggttctttgtccttctcgataatcaagaactaaccatatcacagtacaacatcccgagcaagctgaagatgctattgcgcacatgtgtttcttaaccgatgctcaccggctttactctcacgcattgggtgtatatgatcttgagcttacattgttggttgctcaacaagctcagatggtaagactttcggatgaagtcattggctgtgttattactcaacactaacgaattctcaggatcctcgcgaatacctaccattccttcgtaagctacagcagctcccagagactcgaaggaaatttgagatcgacaatcacctttctcgcttcgaaaaggctttggtgcatttgtatgctctcaatgctcacgatgagatcagcgcatatgtcgtcaagcatgtgttgtataaggaagcccttgagctctacaagtaccaagcagagcaacaacgggaaatcaccgagctctatgccgattatctacaaagtcaatcgaagtacaaagacgcagcagttggtcagtggtttaatcagcgcgacaaaatgacagctagctaattttcaaccccagcgtacgagtctctcgagctttatgaaagtgcttacaagtgcttcaatctggcgcacaaatggcgcgagtcattgtactgcgccatgatggcatctctatccgaggaagatctagctgctcacatcgacggtctggtcacaaccctagttgacgaaaacaaggactacgtcgcggcagcaacaatctacgccgaccatttgcatgacatcgtgacagccgcacgacttctctgcaggggatcgaagttcgccgacgcagcacgtctccttacactacacggtaaacagagcatggttgtcgaaatcgttgactctggcctcgcggaagcaatgggcaacatgaccgacctgcttgccgactgcagatctcagctcaatgcccaggtcccacgactcaacgaactccgtcagcttcgcgctgccgacccgcttgctttctacggtggtgaccccaccggtggagaggcgggcgtcgatatccctgacaacgtctcgctggccccgacagatgcatctacgcttgccggtcgctccatgttcacgcgttacacgggtaacaccgggaaaacaggcaaaactggaatgacacgtcatacctcgaagacccgccggcgcgaggaacgcaagcgtgctcgtggtaagaagggcaccgtttatgaagaggaatatcttgtcaacagtattcgacgactcattgaacgggttaactcgagcgtagcagaagctgagatccttgtcgatgccctgctgcgtcgtggcatgcgtgagcgtgcagctgctgtcgagaaggcattgcaggaagtcttggctatgtgcgcggattgccgggacgaggtatttgaagtccctgcccccaatacagcgaacgaggaccaggaggatgaggataatgatgtcgagcccatcaaccctcctgtttacggaggaggtgccagtgttttgagagaaagtatagccattgttgagggtggcggtgccgctcgcgtcaaggagatccctatcgtcaaagaaatgaagaagtcttctttgctagcttgaagcagttgatgaatatactgcgtgagcctagcatctagattatgaaatgaaaaataaaaatgaaaagttgcttcgattccaataattcgccctacaattatgtatcttgatctacatgttacacttgtatgacttgctagcaactttctacaagatatctcaagagtccctaggctatgtcctgtgagtctacgagacccccataacacaaatagaatacccctccacagcagcctattctcattagaactgggtccgaacattgccttttcacggtgggcgatattgagtcttaatattcactgtgaacattctttcacagcaaattgagcgtggtatacttgaagctatggtcattctagttttgcttttgctttatcaaggtgactgggatattagaagtgaagtatatatctcttggtatgaaaatattttgatctcgagcgtcgaagctatctatacacaggtcatcagcacaaatactcaaaaggttaagtgcaagtctatgttgcacaagtggactatgatcattcacatagtaatatcctgaagcaatcaagccatacactatatcccgttaaggtaaagtagtacaatagacacagctatctcactggatgacacaaaactgacacatatatgttgtgcttctgtgcgttcaaagtatccaggatataaaaaaatgattgtatccctcgtctgaatactaggactgcagccaagaaaggattccaccctaggcaaggcttttcctttccaagaaccgtaagtgaacatttcaaattatctattagctgatattaacctcttaatgtcttgatctagattatgcacctctccatctcagcatatctcactttcctcgtgggcctcagcacgctagcgacggcccaagtggcagccccagcccggtctatcaaatgcgtttgcaacggtatcatcgagaatactcagtctgcctgtgttgagactggtggaagcttcaatgctacagcctgcggctttccgggttgctgtgtttatgccaacgaacaaactacgttcattgagaattgtaggacacttggatatggttttaaacgctgtgatgattgtcgttcttgttgagaatacgggggagatatacgccgggggaaggatagtaagacggacattggacgtataaagttggaagcgaacattccattgatttgcattccagtattgtgtcatgtcgtcatgtgcaatatatattattatggaggaatggaaccagacgtgttgcttcagtataaaccgagaacccactgccatggtattattatgttcgatatcacgagggagaaaataagatatggtgaacggaatatctgcgtcaagcttgcatggccaacttgaagtgcccgcacaagaacctggggtatctttcaagctgacagaccttccactgttagccagaatgagaataccggttgcccggtgtagcttattcaaattttctaaagagtgctgaggatctcgccagtctcgctgacaaggtggtcttcaaccttgacagggccctctccgacgccagtcaagatgacacggctcacaccatccttcagaacttcgacggcgcgagagtcaatctgatccaaggaaacaccagcagtgacattggctagtctctcgtagaatacgccgtcccacccttcagtgttagggcccagaatagccttgacggtgccagccacaacttcagagtccttatcttcatagtagatgacagcatttgggccagcatcgaaagtgtaggcacaaaccgtccggccaacaacacggttgatgtcgtgcacaaggcgaacggcagcacgagatacgtcgttcatgtagaagatagggggccacgagtcgaggcaagtggcgtggaaagtgttcgagtctcgcatggtaatctccgcaaactcgtggaagttgcgggtttgaatagcggtctcaatggcatccatacgcttgggaacaacgttcagtacacgctcagcgaaaagggccgaggtggccacagtggtctgcattccctcggtgctgggcacatccttcttctcggcactgacgaccagaacaagagcccgcatctcaggccagtgggttgccggagcaacttcctcagccaggctgtcgcttccatcggcaagctcacccgtgcgccatgcgacatacccacccatcagagagcggcaagcagacccggagccttggcgcgcaatgcggctcagctcctgaggcgactggggcagttcgtaaaggtcagcgacggcgcggaccaacgctgcgaagccagccgcagagctggccagaccggcagcagtggggaagttgttctcggagacgatccgaagagggtgggcggagagcttggggagcgaggagtcgccatcctcaagggccttgcggagggcacgaaggctggagatacaagcgagtgtccgcttggaagactggatgtcctgcgggctgccgttcaggttcagggtgtccgcaggtgggtattcggcagagcaagaggcagtggtcaaggtacggagagagcgctgagaaagtgtaacagagagggaggagtttgtggggaggttaagaatagtatcacgcttgccccagtatctagaatacttctgttaaaacagaactatttggtataaatgagatgaggggtaatcagcggcatacttgatgacagcaatgtttaccggagcggtagtagtggcccggtaaacagtctggtttgatgtaacagtctggtttgatgtagacgccatttttgctttgaatgaatagaagaacaaatttctaaagaactataggagacacgaggggagatttacttcttagggggattgttgatttggctgggcggtgagggggcaaaataatttctacggcgtagttctagttccgcggatgcgccgttcgtcctccagtcattgacctccaattagtattcaacaatgggagctgcagcaagtacgccctccgcaccttcagtggagccaccagcagcaacttgtcctgtggaccacaagactcgtgagatttggttgcaacaaaatagcaactcacctcatcctacttccggtgtccctgccgaacagggacaaccacgtgccaaagcacaacgacccctatcaacagaccgcgaagtgagcactatccctagagctggtgatttcagctcagcaagtgcttgccccgaggccaataagggttctccatccccatacgccgcgtcgcatggtagcccgtccaatgccgaatccgagactggccgcgatgaagctactggaaattggatctatccgtcggaaaaacagtttttcgaggccttgatgcgcaagggtaacactcctggatccactgcctcggcctcagagctcgcgacttccgtagcctccattatccccattcataatgccgtcaatgaacgcgcgtgggatcaaatcctcgaatgggagaaaaggggcccctcggctgaccctgggagcaagaaatgcggaggcccaaaattatattctttccggggacttggagtcgatccacagtacctgagcccgcgtgcgcgaatcaacggatggcttggctaccagcacccatttgaccgacatgactgggttgtggagcgttgtggtggtgaaaagatcgaatatgttatcgatttctaccagggcaagccatcggaaggcaatgcaaccccatcaggtctggctgccaatgccaaacccgggaagctcagtttcttcctcgacgttcggcccaaactgaacacttacgaaggttggaggttgaggttcaaccgcttcacaggtctatgaaggcatcattgatggtcgtcttctggcggaatatgctttcgcactgcacatacaaaggcgacaacggagcacgggcagtatttgggacccaattgggtatattttgcatgtacaacacatatcattctgtacgatatcaggctacaggattaagggacagtgatgaattaatgttctccattccaatacacatcggattggcaaggaatgcgcaaatcagaaataagagaatgaaatgaagcgaaaaggtgagatgattgactaacggaaatgcaatcatgcaagagggatatcgtgcgcatacatgacaacattaaagacgaaaaccgtgatggtagccaataaacaagaacgaggaaaataagagagatctatccgaggacaattgcaagcacaataatagcaaggataacagcaagaatcacaaagagacagcaggctctgttgcgcgcattcttctgatatctgctagcactgcgcaattcgacattggcgcctcgtgtgtcctgggtgacattttggacattctcgctgatgatatccaactgccctccttgttccgtaacgatgtgcgcaacatcacggaagagctcgttcagctctcccacactttgttcgatgttccggatctctgcctcacgctcgatgatcaaggactcttggaagtccacctcgccctgattcgccatacggtgttgctcctccaatagctgctcttgtaattggacatcgttgtcggcagacggttgctcgcctccttcgatagctgtacgggcagcaactgcagaagcgcgctgtttctcgagtgcacgacgctgaatagtttggaactcatccaaggtggccttgaattcggacgatagcttctgctgtgtccatttctgggagggctataagttgggacgttaataagaaattctcgctagtggataaaatcagatggatcatacattgacgtcctcccatgtctggacctgtttaatcccttctcctacatccctaaacccggtgcgggtctcttcaagcagattatgaactcgctcgcgcacacgctctgtatcgcgtttggttccaagaagggcaatctggttggataggcgagagatgttcgatgtcaaggtaaatagctgatctgagagctgctcggccagatggtcgaagtccggatcgtcacggtattgcgggtcttcagccctgcgcatggtggtaggctgagcctccaacgagtttagcctgtcaaaagacattctatatgtagtggaaaagcaattaatgtgtgcttaaagtgaaggtagaagaagactcgataccagatgagttatctgcagttccctgctgcctttgataagccgcgttggtgcgcagaccgccctcacatgacgtactatgcaactactaggctcgatatagactagctcctgggacaatgcactttgcgccacatatcacatgatgagacgtggctggtgtgttttgatgcctcaaaatattcctaggtggacctcgccgttgattctgtccgaccagctcaacacaatcagctgtcagccgtggctattcgtcaacaccgtcactagcccgccaattccgttctccagctcccggagctcgccatatgaccgacattctgatcatgctctaatcttcaacaatctcattctcttccacgagcgcatcccactcccaagctgacatcatggctgttgttcaaactcggccgtacaggcgaattttgacttcggccttgcaccgaagatttgtccatgcatctgcactttcacttctggtctcttatatcatcgcaattgcgatcggagagaaatcgtcctgtgagtacatcgcaaccttattgggtcgagcctcgaaggctcagcttcaagtcctgaaagtacaaagaactgataaaactatcctatgcagttttctggctatggtttccctttggtggttgcggtgttcgaactgtgctacttttcatatcttcgctcaccatttttgttctccgcgtcagtcaaatgcacatcggctcgagaacagctagctcctcgttcggcaccttgacatccttcactctgttacaaatcgcgcaaaccttcggctggtacatcttttcggcatggtggttcactctgatttatgtatggtcgtcttcgagtgattccaacctcgagcttgtgaaacggggcaggtgcgttgaaaatccttcaaatgactgcgatcgggactaatgagatacaggccacacgagcgaccgaccctgaacgaaaggccgatttaccttcattccttccatatgtttctagcatgcgtgcaagcagtgttccacctctactacgactacgaccgcattgcattgcccatcgcggagcaaagctccagaacaaatgacgagcgtacccatccagtaccgccaacctccaagtttctacagggtactctgctgcgagaattggcagccggggctctcagaagcgttactgttgctacagcgtctctcgtggtataccccatatttttcagaagctttgcttggagctggtctttgtactttgccaagctcttttggagcttcccgagatctgcagccgagcctcaaagcttcattccctcgattttcccctacttcttctttggaaccttggtccccggagtgttgcttgtcctctcctggcaaaccgccaacctcttctattctgtgttcatcggcaaggagcctttgaagcggggccagccactcacaacagaagccaaggatcccaatggcagtcttcttagtggcctcaaggcgaagaaggaagttgtcaagactttcgcgctctgggagctcagtctcattagccagcgcgttccggaccgccgaaaggcaattttcaatgaaattgatcgcgagggtggttcgacttggtcccaagttcttgcttgcactaccaatgtaatcaaggccatcaacactcgcatcgaggaaagcaaaaatcccgcgcctgttaccaagcccttgccgcaagccgagagatccgagcctattcttcaaactctcccgcgactttcggaaccgatcaaagatgaccacatctttactactgccccgaaggctacttcacgtcaggacaaatttggcgatgcatttagctcggcggctaaatcaatcggtcagtcagaagactggactccaactgcgcgagcccgagttcgtgatgttttcgaccgggcatcatcagcaatgcttagccctgagcaaaaacagaaatatctcgcctctgcgcagaagttcaagctacttaccggcggtccctccacaactcataaacccgaggacatgaatccaattctggcacagattcttcgttcgcctatcggccaacctttccgtcaaacatacgctcaacgcctctctgctattgttcttggcacaccagagtcctctttatccttgattgtggatgccgtagagtccttgactcgactcctcgttgccagcttggccgaagatccatatggcaaagctcaggccgatgtacccttagccgtgcgacttttgacccaaactactctcaccctggatgcatttgcccaccagggtggattgcatgcgcactggaccgatatcaatttcccgccatcgagcgatccccaggcgcaagcagttgcccgtttagttccagatgttgaaatcgtgcttgctacacttcgtggtggtctcaaggatctactgacggccttcagaccttacttgcgggatatcggtatcgcaggcaaggatttgaggctcgcaaaggaggcagctggcatcgacggggaggcggtgttatgatctatgtctcttttctgccgcaattttttaatgctatatctcatgatttctcttcacaaaacttcatgtattgctatttctcgtcctgccctctagtcctatctagattgatatcagtggacaaatgcatggttaggcgttttgttaagatgggcgtggtgggtgttggttgaaatgcaatatcagcttcagtgaatcaatacaagctttcccatatttccatcaatgagatcttcttgaattccaattaatttgtaaagagatccctgtcggcgagctgagataccactctgcaagagccttgaacgccatcgaagtttcctcggggaaattgtacagcttagtagtacgtaggacgagggcttggtcgttgaaataggactcaaaagcgcgggcacgtttgcccctgaatgagattagaaagattcatagagtacggtaagcgactattcaagcgactataggaagcagaaaggaaaattaagaattaccggtaccttcctatgctaaagaaggtttaccttccatagctggcctagaattaagcagagaaatggtaagagctccccacgaaaaattatcccatccgtcatgtcagtatcgttgtatataaaggctttagtgtatgaaatgtttcccacgaatattcgtcagcctggaagttccaaatcgaggcttatcatccgatgaaaattcttttgaggtttgtaatagctaacacttcccatgctattagacgttatgatctattggagtgagtggtcgtctcactcttttgaggtccacggaggatatacactcgtcgggaacatatgacgacaaggggcctgctactttacggacctgtcgacatggtccttgaaataagtatcctcaaatgccaaagttgagcggacttcatcaataacatcctctagctccaacaggactctgcggtccctgtaatcgtgattcagcagctatgttgataagacatgagatgggatggatggtgtagatagagggagttaggaaatttaaatttagcaccataagcgccttttatctcactagctctatttctatgaagcatatatataaccatgaaagaaatgatgatctagagagtaatgtggggaagaatgtctatggaagtatggatcacatgacattgatttctcaatcaacactaacctcatcaagtccatctacacttgttcaacacaactccaagcagcaacagaagctctaaaaaactggtagcttagagaaaccatttttctttaaaattatgtcattgacaaacgtctaccatgtgcgtcgagtcgcggatacctctgcaaaagcgtgtttgatttgttacaaaccatcaaccagtgtgatgatcacaccggacaacaaggtatgaaatccgctctcaaacctttaatttggtgtacactattgtttcttcacctaatatcccatttttatacatgcgaagtggctaattcacctaggacttcttctacgtctgccccgcacatttgcaagacaagaatttctgctctccaatcgtcgacacagaaggccaagcaaagcgcctcaaggaagaggaaatggccaaggagatcgaaaaaataaagaaagaatatgaagaaaaacaacgacgcaagaaagagcgtgagaaggcctctaacaaggataataaagaggaaaaagacaagggcaaagataagcccaaagatgaagataaagctgcatctgattcaaatgcaaaagatgaaaaagacagagatgataaggttcgtgtctttccgcagcaaaggaaatcaagcatatacttcatatgaacgtgtttgctgattctccctgccagatcgcttctatccagaaaggctctgggacagagacaaagtcagatgattcgcctcgaatcttctccttgcacaagtatgtggtgatatcgtgctcatgatagtaactctaacggcgaaacaggaatttctatcagatgcgcatcgaccggctgcgcagcattgaaatgacgaaacgcaaccaggaaagattaaggcaaccttcactgtttccgtctgtaccgtcgggaaatccttagatacattcgctcatatacttggggagtcagtatgggtagttcgagatacaaacgctagattggttcgcccatcatcctttgccgatctggcaggcacagtgaagatctatgcgaggggaaggtgatacaaaacaaaggcatgtctggctattaatttaatatctatgactttgcgcagcatttttgatactcccattagtcactgattatcgaaccattttactctgttttgacagggttgcggaaaagaacagacgcaaccgtactgaaatatcataggagttttatttccacatctatacatcttctattccttaggacttaacacaattatccgcgtgtcatatagtcctctggcaaaaagaaagctcaaagtcatagacgtggtattggccccggcacggggcagacacatacagccctagaactcatacaatgggcctccatttacaaacggaattctgatcctgcaggatgccgattgcagtagtgaaacctccaagctggtgacccgctcattcttagcacacatttttctacgaggcgtccaacgagactacgttttttaaatgaatatccagccactctggggaaatgcatatgccagatcggacattgaatttctatttcctgccataaatggcttggtgtcacgatgctctttccgtattgcatgacctggaggtgtgggtacaataagcactagtcaactagagtggtccacaaacccatcataggaactgcatcagccctagtgggcagcgtactcggtttgttcctgtgcgtttcgatagaaccattatttgtatatctgctgcggccttaagttcgtatacgtgatgttggaatgaactcttcgtgtctgtagactgccatggtacatataccgatatttgtactctcgcctccgcgtcgagacttgctccaactcactctttgtagtctagagctcagctgtgcactcgcacctactagttcgaactgtcgtctctataattgttacgtttctcgccttagctactaattaataattacatgctagttatgccgtcgtttgtgttaatgtactatgccatctcaatgcgagtccttatacggagtacatagcccgcaacatagacaactatacccacaacacttcaagaccgagacagacgcgtgagattcaactccatttaataatacagctgcctggaaaggacaatatagaattattgaagaagcgtgtctcaaatttgccgattgaatgctgcctggcaggatgaatagtgctttactagaccacgcggccaactaaactagcgccattcatataggaggcttatagaaagtgctgagataaaatgaccaacttaggtagacacgattatacctcgtatacctcgtatagattactccatagtatattggccgacactcttactcatgtgagtatagtagttagtagttaaatggtatagaagtgctttatttagctaaagtacccggcagcctataattaactagttatccagtagccgactaattcaagatgtcgatgagacactaggcttttcaatcaatagatgcgcagatatcatacaacgaagtaagactgttgtagtcatagttactgttttgaacggcaagctcttataatatagattatccagatataaataagccactatactcctatcatccattaatcccagacagacctgaaacaaagttaaatgccagcgctaaaaccgcatctattgataaactatgtaacaatgatgcgagtcttggaaatggtatctgtgcatttaataagccaagccagaccggatgggaactccactccaccgggagctccccctgcaaggcaatgtgcactgcccacccccacagggaaagggttgccaatcacggtatagatttggcaagtatgtgccgtctagttagcctgtagtgcgtaggggcaccaatgagaggtggcagactaattagatctacgattagcaagaactacacgactaatgtatgctattagcgatgtatatagtactaaaacccccaattagaagacaatataaggtcttcgttgaaagatacaagatacaataaccaatacataccagacagatacccgtaataccaatacacataccgacaaccaatcgggaaacccaggaaacagacccgctttgcacagcctccttctgcctcaaaccttggaagtcgaaggggggggaaatgaatcggtcaatcccagcgtcattggcgttacgctgatccttaaaacattcctcaaactgacagcgcttcggtgagtggggccactttaggaagaaacatcgaagtaaagaaactctggagcgaaaaagaggaagaagaagataagtggagtatgcgtttgcgtggatctacccttttgtgggcttggtgagaaactcagggttgtgcttggcgcgcgattaactaccatttttgtcttggctgggcgtggctcgactcgccgggaataataaacacgagtcgagactttggcacgttggtatgcggcgcagccctagggtaggttgggtaagccggtcccgacttcaattggttaccatgtacgattcgaaatagggctttgggtctgtctcatatcgccgatgctgtattactctctatctttgagtttgtgcaagatgcaggttttgatttgtgggacatggctcctaaccaacgggggtggtgaatacggatcaaagatggatggataggtacatgggctaggtacatggtggcttgaggcggacatggctcgtatgtttgagatggattgatatcataagtgctgtacagatcagcaggggcatgtccgctggcgtgccacctaattcttgctttgtagatcgctggatggagcacggagggatctcttgtcggattcagcggcttgtctagaaaggtcgcagtgtgctcgagcctcactatgccattgtcgctgcctgtgagtagaatggaatgagaccaggcagtcatgttcttatcgccagcgacaatgttcactctccacgtgggtaggaggtgttcccaaagagtaggtgcctcaattatgacccagctggcaagaaatgatggcttccaagggtccctcaggtccgagctcagatgtaccacatgtcactgacgacaaggcgcgtgagcgcccatggttggcacacgatcatctagaaccggacaaaacccataaatgagccataaacaaatgtaagttggagctgtaagctttcataactcgtaaaactatgtatgcatgtatggtgttcatcattcatctcaaagattgccacgcccagagtcattagctggcagggcccgcattcccggaggaagacggatggcagggttagcgcgagccatgttgacctggtatgcgatatcgacgcgggccttggtcagaccgatggctggcacgacccaaccaccacagctgcatcgaagaccctgccatgcaaacttgccgacattagacccgcagacaggattagggcaagtgagacgcccggagaggggggcatcgtcaggatgagcgccgtatgttgtatccgcgccagcatcagctccgacctcagatgggaagagactgggacgcatccaggtcagggggtggaggaagacatgcccgcaatcggcagttgctgaggacttggcagtgtttttcttctcttcttcatgcgggatgatgaatggagtcgttgccaatttggttctgtgatgggtttagtttttctgaatatgggtttagatcttcaactgtggaactaacctgcattttcgacatttaatctcgaccgttcgaccggtagggtcttgggattgaacgggctgttcatcttcaaatcgcacagacttcaactctggggcacggccacacgctacacttccttcgacatcgcggcgataaagccagcgcttatacgatgggtggtcggtgacctcatctgggcagcccatctcatggtacaaattcagctgttccatgaagccatcgtttggctcgcataggggcctgctttggcggatcagcgcaagggcagtttgcggtgtgagtgctgccggctgccggtggagcaggtaggcgatgcaaatggccgcggagcgggacttccccatcgcactagatcatattagccagtgtacatctttctatgataagcaagactaggggcaaggcttgtgggcttccagtaaaagggtcgggccaacgcgcatcagaaccttttacgggattcttcagccacgtgtagatcgcacttagatcgcacttgatcggatacgcaatgacgtaggaggcacaaagccactcgagaatagcattccgcaagaggaataggaacgactgaagagccgggacagactttccgccagtaaaactgaaaattttgcgttttgacttaccagtgcacgagtacacctccaccaccgtctaggccggactgaataaacttgatagcggcggggatttgttccaataaattttcatcgtcgacatcgtcaagtcctatggaaagatgctggtaagacttgaacgtctccatttcctcagctgggttgagacgcagcaccgagagaacatgcgagatatctgcacgtgccaatgctgctttgtttttggcgcttaatatgctacaatggcgcgttagcaatgaataaagaccgcaaattaggaactgccaattccatctccagcctcagctccattttagaaacatctgggcaaggattgtctgttagcgaagtgagaccaaccctccgacatagatattgtggccttttatttgattcatggccattttgagatatggtggctgcacgttgacagcagcagtatgttctgttgatggcgacagaaaaatacagaatttagaagctcagctccagtgccagtttgataacttgactctttttttcgtcctagatcgcaaaggcggaggttgagcctcggcgctgccaaactcaaaaagtctgatagggcaagggtatgacaaagcaggtgactttgatgcctcaggcaaatatattgattttccgattttccgatctagtatagttgtcagttgatttgaactccatttattagtcctcgaagatgcacgagtacaacataagtacagctggaagagagtgtggatttgtatacagcgtggcactttggtggtcatccactatgaggatctcccccactctacggagtagggctgtcctaattaagtaaattaagtacaggattacagtgtctacgttgtagttccaggtgtttcgtgcacagatagattaaattacaaagaagtctagccgagcgttttccgagcgtcatttacatccaacaaaggtcaaacaattgacgtccttagctgatgatatgattcgctacgcgagctgcaaggggggggggtgctcacggggcaacaaaaaaggaagctagatttaggcttagttaggcttaccgcggggaacttggacctaaactgatcaggaatggagccataaacggggacgaagccatatacggcctcgctactccgtactccatacggagtatataaaaacggctagcttgtcccgcatcacattgactagaggcgtgacacgcgcttctaggctgcagccctctaaggcttaagctgcctgcgcctcaggaggtacggagtacaatgcagcaatacacgggctcttgcagggcttggtttttgctgacggcctgggcaaagactgggcatgtcagccgaaggcggccgaactaaggagtacaaaatccgtcaacccctccctgctgacggactaagtgttattgctgcctgtcactgaaaaatgcggaaacgcctcgatgcagttgtgtagcctacctagtcagccgtcatccgtactaagttaacgcctcctagaatatcaactagcttgacgatgacgatcgatggaaaatacatacatacatactggagcctgaaacttattaaactggtctttggtacgaagtacaacatacagaggatgaatcactgtagagaggtattaacctcccgccaagagattcactaccaagcaattataaaaccctgatgtcgagctacctaacggagaaagcctgcctgttggaagaaaatcattactgcgtacagactaagatgcttgatcagaagatccgatcgtcatacgcgtgataaggctccaggggtatacatataaatctcccacccgattatagtccacacatatattgtatcaatgtagactagaactgaagtctaagtacaaggatggattgcggtatgaaatatacaccatttccatttagcgatatttcccaaagaagaaacccaaaaagagatttcgttctcgaagctgatgtggagcaggaatccgcttactcagccctgccccctgcagccctggagggtttgttccaacgttcttatttctcttctccccttcatcgccaaaacctaggccattttcagtgatttttccaaccgaattgcatgcagcatgtcttgctcgatggatatttgatcataccacaagcgtcaaggttcacacccccctacgcccaaatgacaggcggaccggcagtgtggcagtgcatgcaatgccaggcgccaagtggggggcgctagtaaatcagtgggtcgaaatgtccaacgactgcatcgtccgctttttttatgtggaggcaaaagaatgttccctaatgaatgtagggcccccgaatcctccgaacgcacaagatctcgtgtatactcatcgtaccacgagttgcacatgtatcgtacaatgtacacgtacttgcgcggcagttcaggatcaaataaccccgattaaccgggggtgttgtcgcatgcgccccttggctgggagatattaagcctaaatgccaagagttccaagccctggtgtgttctcactggttgccaagctgcacaagaccgtgccaatctatacttcattctcccaaggactcggcgggattgcggtacccctctctatgaacaagtttcgattctagaaaagcataaaccatggttcctaggtgtttctgtcgttgtcggggctgggttggtctcaccgaaggacctttcaccttggcgtagggctaataaaatacaaattttgtgttttttggcatgagacttggtagaaggtgagattaaagaacgttatatacatcatccgctgggtcgcattgcgaggcgtccaatatacgagaaacccccacctatccgcacggccattcggcaatgttctggttggcttccatgatcccgtcaaataatgtgaagactccatatggggtaggatagtgcgtcacatagatcagcaggaactgttggaacttggaacttctgggccagtctattgattcccggttatggactggaccatatattggagctatagaagtgtatcggatatctacaacatacgtaaagcaaaattacatgtgttaacgctaagccttgtgccctaagaactgttgtcattccaacgtggcttcccacgcaagatccaatgagataattgtcaataatctaatgtttaattcgacctgaatacccataactaccatctataccccgtagaagcaatccattggaaaatacacaacgtccgtaatggtatgtaacagccatgacccatatatcctcgatacatacatatacgccctttccacgtcacccaaagggcagccctggccctgcctggcctgcctggcctggcttgggatgtttcgattctttttctttttcttttttcttttctttttcgcctcttcgtctttgattagttgaaaccttcaaatcttcatttttcccttctcccttgaggatgagatcacctcaacttgcccccctctctttgcctgaattggatccaatcgcttgcaccgcccgaattcctacccgatacgatctgggcgcatttcaattctcaccttttctctttttgatttgacctttggttttgatcttcagctccagcgccagccggcctttccttttgcccttttatttatttgggcttcagctagtggggttgccatacttagagtgtgtgtatttctttatactcaaataccggggctccatggcaccattctaacatgccctagttctagctgtgctattcttttctattccccattaaacatgtgtgcatctccccattgagttacagtgtggccaatttctatgggacacagacccggttctccgtgtgtcacttgcgggaaaacgtttcatcttatgaggcgaatcgccgaacaagggtcccgaggtaggtcttcttcagccctattcttcctactttcctaccccggtcttttattatcacgtcaagcccactttcaaatcatctgacgctcaaaatagactcacaagacttttatcacctgcatgaagtcctctaacattgtcctataactactcttcgactcaagtaggcagaagctggaccttctgagaaactccttctcggagtgtgaggctggtgaacggcccgcttaacaatctgaactggtttcacgaccgacatttgcactcaactggattgggttattgctgggataattgagatcttgattcgacctgcttgttccgatttatatcaagctcgactcttctgctttactgggtttctcagctggatgcgtgcccatcttgatctcgattccggctctatgttctgcgtctagaatggaccttcgattttctcagtcgagcttctatgatttcagacagcacagacgccattccgaaagatcccaatacgctatgcccgagctgaccgtatcatctcacggcccgttacctatagccccacgaaatagagctactatgaaacctgcgcctccgccacttccgcccccatccagaatccccgctttggagatgggccatgaccccggctggcagtacgcaaattctcaaactccgacttctctaccttctatcaacccgggctcaagtctgttcggaggtcatcgacggccggtaaccgcctcacagggtgatccaatgcagatagacgagttagaggggaggcagggagctccactctcgcggagtcctgaaactcagatccagatccagccaccgccgtcagctacagacggatttccaaattccatgtcgatcatcccgaatccgacaggtccagtgtaagcgcacttaatgcgcgaggagtgcgaacaacttggtttcgcagtaccgcgcttttctatatctgattgctaacacattgatagtttgagtggcgagcgcgaattttcactgcgtagtgtcaaagactcatcaaatgcctacgatcaacatctattatccaaaattggaaagcctcaaatagcaaaacctccgtcccccgggggatctatcagtcttggagacagccgaaattcgctctctgcacttacagttcctttacgaagcccaagcaatctgccatcacccgggccttcagaagggtcaacgctggatgtgaaatggcacaatagccctcagtctgcgggcgtttccccaaggacaaatgtcaactggagagagtatgtcgaaggccgaagcccaagcgtggagagcaatgcaccatcagcactggattacgaccaaggatctttccgacgccgctatcgtggaacaacgccccagcgagaagatagcatcagtctaccgagccgatcgaaccgtggaagctatgaccagggcgttttttcagatatcgagggagagttttcggccgatgagccggcacccccacgacaattcattcttcgagagcccacaccgccgtatccggattctagacagggcatgaaacgacgggcatcctcacctccacgtgagccgataagcgacgatagacataccttgcacatcgcgacgagtaacggagacttgtctcagcgaagactcagtggtcatccgttcactaacacactatcggtcaaccccaactatcccgcgagtcaacgaaccctctcaaccggctcgtccttgagcatccggacctcgggctcgtatccgtctacgttgtctattggaggtagcagtatgaccagcctttctccgtacgatcggccgtctccaggtggtttttcaccaagctccgacctcgatactttccacgagaaatcaatcctcaaccccagtcctcctgcggcgctatctcacgctacccttccaagattcccagggcctgcgtcgttagaaccgcctgcgacggattccactggaaagatgtctgtcccgactattatgagtttgccaaagccagccacgccgaagatcggcgggcttttcatctgcgattgctgtccaaagaaacccaagaaattcgacagcccagatggcctgcggtaagttgatcgagacgtcttcatttatgatccatactaatttagacagtgcacacgagatggagaaacagtacgcatgcgcctactgcaaccaccgcttcaagaacaaaaacgaagccgagcgacaccaaaactccctccacctccgacgccattcatggtcgtgcgccgcgctcgtgactttccaagcagcattccacccctcaggcgcacaggcctgccagaccagtgccggggctgcgcgtgacacctgcggctactgcggggaggaattccccaatttcccacaggcagactgggaccaacgattcgagcacctgaccaccgtgcacaaattcggcgagtgcaacaacgcgaagaaattcttccgcgcagaccacttccgacagcatctgaagcatagccatgctggcacgagtggaaagtggactaacatcttggaaaatgcttgcatgaaagaagagcagccgccggagcctcgcgagcctcggggaccaaaggataaagctgcttctggcccccagactgggtcattgacgaccaatgccatctcggaagttattagtgagcaatgacaatcaataagtcgtgtctcccttgatcgcggatttgctcttccttgtggcatccggctacaagacggtttccggcaaacggctctgtgctgttaatcacatttgccagttcatactctgcagttagatgatagtccaccctcgtggcatcgtctactctttttggatatcgagactaaactcatttgcattgtatttgcaatcatgggtattaaactagaattctgaatctccaccacatacctgttcataaaaagacagcatcacctcaacatcaatcaacaacaatctcactctcatcacaccggggacattctcatctcacaaacaaaaacaacaaaaacaaaagcctctcatattcattctagaaaaggcaaagtgagacaagacacttaaaaaaaacccacacaaggccaaaaacaagcctgaactcacgacctgaaacgaacatttttgaacatttccttttccacggaaagagaaaggggggagggagggcgaagggagtttatagtcgggactgggatctttttttcaggatcaataaaaacctctgtgtataccccggttgcattgcattgcaatggggaggattttcctttctcattctcatctcatctcatcttttttaaaaattggagtcggtttcttggttggttcctcgactgggtggactggaatacaaggatgaatggaatactggatggaatacctgcgttcggtttgtgtctattctggtttttgctgttctgctaggctcttatatatattcccccgcctgttttatacatactttggatggatggaactgtgaggcgaatggaggggcgttgtatatatattctttttcttttgcatggtagcctgaacgaaatatgtggctttatgcctttttctctagttattttggttctttccaggattcgctggtaagtagacttttcagtattaaatgtaaatcctcattttgatatacagatacacctagtgagtaagtaggtaatgttccactagagaacaaagtaaaagcacaattattcaaacacaagactcttgaacccatctaaatctaatagaaaaaacagcctggcccaacccagaaggaaaaaaaaaaacccaaccaatctccacctactcagtaacactgtccttaatactccgcagcgcactcaacttatgctgaggatcaatagcagcagccatctgcgcccgacgccgggcatcagtccaaaccataaactcgccataccccttcggcataacatgcacatccttctccacaaggaaagtatagttaaacatgcccgtggacttcttcgtgccgtgctcgacatcccgcaccttggagtcaacgcgcacctgcaccttggtgtacttggtgctatcaccctcgcgctcctcgggctccgtgtacgcaaccgtggcgcgtaggtacagcacgctgcctacgggaacggggttctcgaaggtgctggggtcgagggcgacgaagtttggtcgcgcgtgtgcgaaggacgcggcgcagcagaaggccagctcgaaggtctgttttagtaggaagccgccgaagatcatgaagttgtggcggttgcgatattggggttgcatgatcatggcggatttgaggacggtctcgcccatgaatacctggtttgcggggcgggtaactgtgctttgggggtctggggaggttagttttttttgcataatgggtaatgtagtgggtgaaaagcgcttacttaagtaggacatctcctttgtccacattgagtggatcaggttactctcttcctcgtcaggtgctttctccaagaggctgcgtgtgcgacgggccttcttggcctggtaattcgcctcgcccttttggaagaggcgtttttcctcttcagtttcaatgatgagaggagctattgagacaggcctagttggctgttagtttgtgtgtatcacgccataagaggagaacatacttcttggtagcaggatccagagagaccatcgtgaaagcacaagtgatcaagacatcttcaggtttcgccggctgtccttccgggcgggccttattgacctgaagggagatttccagactggagcgacctgtcgcataggtacattggccgctgagctcaaggtcacaaatttccatcagcggattctcaatggtgatccggtcacacgccgcagtgacagtggatacaccgtcacctgtgtgacggtaagcaacgatgccagctagggcatcgaggtccatcagaagcgagcccaatctaatcgcaatcagtcaaatgcccctttgatatgtggctatcaaatacgcaccgaatatgcccagaggaattgagataagaatccaaaagccatttgtcttgcgccaaaggcagaatctaccaaccagtcaataccaacggttccaaccccacgatataaaaatttcatacgcacagcactgtaatagctatccgacatcttcttcggcgtgacatcacgcttaatgctctcatcctcatgcgggccaggcttctgagcctcgcgcatttgtgtcaacgcgtcgatccacggagtcttgacgcgcatgggcatccatgttggccgggccgctgcctgcgacggcgtggagtgaaaatcctgggtgttgatgcaggatggctgagctgcgactgcagctcgcgcgggcagcgcagccaaggattttgagcgagcgagcgctgatcttctactgaggccgaacattttgatgtcgaaagaagggggattaaaaattagataaggatgtagatatcggtcgattgtactccgtactcaaaaatgacgatgtcccgaggctctgacgttacggatgtctccagtgaccaggacagatttaatcacatggtaggttggcagaacgttaccgccctggtcgctggacttttacagtgaatttactggcaatttacttgattgttttgctgatttgaatggcagttagttctgtggactaaatttcctggcaaatatactgaaacctacatattctaacgagctgaagtgatagctcatgagtctataaattacgtatctcatggtcactgcagcgcgccgtgagattatttaccggctccggtgattttcggcccggataagagaaacgatgtcatcacttccgattgggaccccgggtttttatattgttctgtagatgtttgcagctgaaagtgacacctcgaagcacctgaaatggaatacaaaaatctaagactaaagaatcacaatctagggactcgattattgctccattcaagctgtcggctaaaacaactcccggttgccatgtgtatctgtaagggttcttagcagtcttgcagttcggaagaaggttgttctgtatcatgcaaaactgaatacactcatccacaactcctttttcatttcattaaaatgcggagggtatatcgtacgatgattgtatcttggagttcatttaagcttacatatagaaccaaactttccgatggccaaataacgtcaaaatgaagtcatcaatctgatattggtttataacactcacttcaaggcgattaactctttttttgcatctattcgaattgacattgacttgaagaacctggaataaaaacaacaacatctatttccaacatgagtgacccaacaaacccgcatatcaaagagcgcaacacacctcaatggggtctctaccagcgagagaacttcatgaaacagagagaaggaacgacaccacttttcaacactggtatgttttcaatatgatctctccaaacctacagaaaccctaactcttttacagacccccggaaactggaagaaagagccaaagagaagctgaccgagggcggctggtatatatacctccccatcacacgagctcaagatccataagctgacaagaagcaacaggtactatgcctcctcaaacgccgggatgtcaaacacgcacctcgtaaaccgacaagccttctaccgccaccgactaatcccgaaccaattaatcgacacaaacaaccggtcaacaagaacaacaatcttcgaccacaacgtctccgcaccaattggcttcgccccgatcggaatcaacaagatctaccacccaaccggcgaagcagcagtcgccaaagtcgccaaagagctcaacctcccctactgcctatccacagcaggcagcacctcgatcgagaaagtcgccgcagccaacgggccaacaggcacccggttttaccaactgtacatgccgcacgacgacgagctaaccgtatctctgctcacacgggcatgggaaaacggcttcgacgcgctgattctcacgacggatacgtggcagctcggatggcgacacgacgacgtcgcgacgtccaactatgcattctaccgcgggttcggcgcggacttgggacttacggacccagtgttccggagcaggtgtcttgcggacgggattgatcccgatgtcgatattgtcgaggcgtcgacgaagtggattgattcggtttggcatgggcaggcttggtcgtgggagaagatcccttggttgatgaagacttggaaggagattagtggggggcggccgtttgtgattaagggcattcagtcggttgctgatgcgagggggtgtgtggaacttggggttgatgggattatcgtgagtaaccatgctgggaggcaggttgatggggctgttgctagccttgatgcgcttgagaagattgctcaggctgttggggataggatttatgttatgtttgattctggggttaggggcgcgagtgatgttgtcaaggcgttggcgttgggggcgcggtttgtgtttattggacggctttgggtttgggggttgagtattcagggtgaggatggggtcagacatgttatgaagtcgttgctggcggatttggatattttgatgggtgttgctgggtacaacggggttcaggatttcaacctagatattcttggtgagtcttgtctttgctgcggtgtaagagtgaatgctgattaggagatgcagagtcggatccgaagaactacacgctcatcccagagaagactttgtgaatggagacagaccaggcgggatcctgattaaattgtccatagcatagctggtatagggacagcttgttactttagtctatactcaatctacaagtcctcggctacggagttttacacccctcatgtattccgtaggactcgtcaagtggctatgagagccacgacttcaggaacgtccacgagaaagactggtttgttatctgatgcagacctacatggacctcatgcatatggtaatgttatgatccctgtggtaggtgaagcagcatgtgctacggcactctctgccgacactgtctcgtgggggctacggtgagatggtggccagagagatggggagagaagaagaagaagaagaggagaagagaaatggggggaagggtccttttatacccccaacccacgtgccttcctcaagtgcgacaggtccctcgctccttccagtcaatgtcaatgtcacatgcattgtgccttctttgtttgccttctttgtttacattgtttgcatagagcacttccaaggaaggtgcatcgactagacattacaactggaaactgtccatgagggattttggcgccttgccaataatgtagacttttgtctatataaatgaaaataatagcaagccatgtccagttcaaacgaaggatacatgaatgtgcaacacaaaagagtgatatatgcagccgagaaaagccgaatagacaaagtgccgcaaacgtatgctagatgagtgggctaaatatgtagacccggtgtatcaacagaagtgacatgatgtgagtgtacaatgattgacaatatgcacagaaaagacgtgggcgacaaatgagtgtacagaaatagtaatacaaaggcagaaatgattgtcgccaaatcagaaaaaaatgccgggaagggaaaataggctaaaatgcagttcaaatagcaaatgcgccgagcatgaccgtcagcatagaccagctaatgccgcggacgaggtgggatgcagagccgccggagactgtggccattgtagaggaggtcgatgtagcattagcggcagacgcagcggtgccattggacgccgatgcagtgaatgttccattgcccacggatgaggaggatgaggagtttgacttcgaaagcgcgccgaatccgatctttccattgtcgaaatcaaacacggtgtagacgtttttcaaaaagacatcgccgacgagccagtttgcaccgtttgatgcatagccgacaatggtcgaaatgcagtaatctgaaccggtcgactcggtatttccgacatagtccttaggcgagacgctgtatttgacaccagagaactcgaactcgatagtagcagtcgagttacaggggatcaagtagttgttcgcgttggaagactgttgggatgaaccggggacgagagaaaacaggactttggcatctttcggagggatcaggaggtaggtagtgccggtgtcgatggtagcggattttccggtgaagttgcaactctttccattcacataagcatcatccacggggatgctccagattttctcattggtggcagtataggaaatggtaccatcgaatttggtcgtatcgaccgcaccaaagttgatttccccatccttcgcattgtctgccgagcgagagagactgaacccaaccaagtttgatttgatgagctttttctccgcaacaagatccatgaaagatggcaaactccaccctactgtacccgagcgacccaggcccaggatcccgtcgaatggataactctgaaaagcttccgaggcattgtcggcttgaccgaaggtttgctcgacttcgagccctgcaagggagattgcgtctttcccaatctttccggtgaccgtgccactgccgtaggcgagggtgaaagtcgaaccggcggtggtgtagctggtggatgctgactggttgaaagtgtgatggcttgtgcagacaggctccgtgcattccgagtcgaagacccaggtattgggtgctccggtgtcgattgccatccacatttcttgcttttgggaacctacgaggacgggagagaagtatgaataatccgttccgtcctggtttaacggggcgctgtttgccaatgacggcgtatgggactcgacgatcttataggtatcgtcgcggcgaacgggcattttctttaggtcaatggtgaaaggtttcgtgtcggctgcgtcggtactctcatcgtcagatttggcatcaatcaaggtccatggaacgaagcgacgttcgactgtagtttccgtggagagtttcattcccaattcccatggatagaaggcgtggacgcctgatatgccggcaatgaagaccagacatgatgaaagatgcatggtccctaggggagtttaggcagaatatagagaagcccgcatttgatagaccgaagccggattcaattgtatgtctcttcatgcaatataaccgctgtttcctggtgagccgaggaattgaaccgagcagctgaatgaatgaactaagtgacagactaaaattgaaaagaaaggctagaaaagaaggtatgaattataaaatgaattgtaaaggcgaggaagttcgagagactcgaaatgtgaaagatgggaggtggcggacattgtctccaccgttgaaaaaacccctgacaagaagttggccaggctctaagccgtaagaggaatagtttccaccttctaaggctcgttttagtactgatcggccgattaaatgaagctagtggagcccaaactcaatgtcctatagaaggaactgaacgagtcaatatttgatcttgaatcttaatccttggactatttttataccgtagactatggatactttagagaatctggggagggaatgtatcaatggtcacaaagtaatggaaactactccatatgtactttacatgaagttgaacagcaaacgttgaagtttttcgtgggaacacatacaatgtaaagatgagatagagcgaacaaaaatggaagcagtaaaatctcaatccgcagaatgcgatgcgacgatatattgcccaatgcccagacaccattacaacgtaaggtctagactcgcaggatttacgcctccactcgggtcgagaacgtctgaccctgataaccctgacagggaccacttttttttgcagctagtacataccgcaagtcactgttcgctgaactattcaaattgattcaagtttaaattccagtacggattttgggcatttcgacctgatccaattgcctgaagtaggtagatcagtagaagacctaaaacggatcgaacatgtagatcgtgagctaactgtggagacagatcaatcgaacacatccaggagttccaccgctgtgtcacaagctgtgcgtactccgtatatcatgaaacaaagccagctatctgaaaactaataatttgtataccatatatcgctagataataagttagagcagatgttatacgagtacaaattttataaaactactgcctaccatagtgacactgtgcgacatgttactattcgtatctcggtataagcatacaaaagttggacattggtggcaatatctcgatttcatacaggagtcacgacttttgctattgctccatcggaattgacatttggaatgagcgaatagttactgtatagatttaggtcggctaaatgggcctagctatggagaggggaactgcctggtaaatagtacccaattatgcccgaagaaccaaagacccaaggaagcacacttcatgcccaaggatctttagggctatctcgaagtagataaaatcatcctaacaaagacacagcacccgtagatcagccacaaccccttaactacggcccaaacaaccacaaagcaccagccacatccggcctcaactaaaacaacaaaaggaagaaaaaaaactccaatgacgcaacatccaacaaacccccaaatccccaaatccccaaaaaagattgataaaacaatcagataatcaccccagctcaccccgaaatagcccgagcgggacctctcccttccccacgacatccaagccccatcccatccgtcccaccgactcagcggcaccaggaaattgcacggcaaaaaaacatacctcggaaccgcgaatatattaccgcggtgccgatagacacacggcaagaaaagaaaaagtgggctgattcgattcggtatccttactactagtctacataactagtactagcgccggtccgtctgagcgcgaacgtgcggacgccattgttccggcggtggatagggacagttatcggcatccgggcttaactgtaatttttagggttattggacacccatctcggcaggcacacatgcgtccgataactaccgagtatgtagttagaccgcagtgtcatccgatgactcacgtctggagctccgcggctggtctgctgacctcgggtcaacggtgtttttttgattaacggcggaggagagatgcccggggaactggatcttcacttgttgtactccgtagatcatggtgggtactattggatttactgcctcggcacagcggagaaggtgtttttttcgggtttattccgcgagtgagggtattgggtcattgtggcaatggattgtggtaatttggtaatttgtagattggaaaggtatgtggatgaatgtgattgtgtttgaattgctctcgctttgtacctatctatttgctgtatctaagtatttagtagggtatgacttatttcgaagatgtagatagtaatgttcaattgactgacacaactcgacacagctgtggaataagatgaaaaagaaaacaaaaagccatgatcggctgacatcatgaagacgtccacatgggaaagataatacatcaaaacgctagtatctcaaaacagtccgacgaacccaaacatgaaaaagacatagcgtgaactatgtatcaagcatcacaagaattgtctcatcccgtcaacaggaccgaaaacaacaagaatagaccaaagagacagaatctacttcctgacactctgcttgggccccagaacatcatcaacgaagccagcccaaagctcacgtatgacaccgggctcagaagtaccattttctttgcgctggagctcctcaccggcacgcgagcggccgacggcctcggtcagcgagaacgggtcaaagtcgacggcgtggttatcgacgacctcgctcatcgcgctggcctggacgtcggggccggcgccgccggacacggtgtagatctggggcttcatggatggggggctaggcgtttggagccttgtggagggcccggaaaggaccgggacttggatggggcgctgcagaggggcggcatcgagctctgccatgctgggcatgtagacgaagtcgacggttgagttgtcgtgtgtggcttttgaggcgcgggaggtgttgaattggcgggaagaagggctagagtgtgttagttttgggtttcttttttgaggggttggattggaggtaaggatggatgtatagaatggaatgtgtgggacatactctgagaatgcattgccgttgattcggcgcatggcgatgctgaaggcgcgggattggaggacatcatggttggagagggccttctcgccagggttgacgggttgagcggcctggactccggtgatgtgaaggctacggcgagcagcaggtgccacgggctgttgagaaagagcgcggacagcgcggagagaagatgaacggggagcaatcattgtgatggtatagaatgtatagagctatagctgtctgagatagagctatgttgggatgcttggtaaaggcagaggtcgccaggtatagagggaaagtggaaaagggggagtgagaagtgagggagcagagtataactaggaaccggatgggagctttatagagcccggggaatggttggggagagctatgaggccacttcttggcggtctggaccgttatcgatagtgtcagccagaaaaagtatagcacgtcaacactggagaaaagatatggagtacaacatagtggatttgttggattcgttggatttgatttaaaatcgaacagaatgtggataattcagactttcctctacaaatgtatcctcttggactaccatggctgttgagtccaatcccccagacacagatctacggcgtaagtcctatcgggactacaccccagcactagcagtgacaggatgtacctggtacatcacttaccccccgaaaatgatgtattccctaaacatcgtatcttcccctcccaaagtgaaactggtgatcattacgtcgtctctggaagatcatccaatgaaataaccaccagcatagacagcggccattattgggtgtcttcctgcagaacggggtaacgcactccctactccataatcgtaacacccatctgcattgtccaacgtagtcccccactcgacgagaagtggaaaagaaggcggagagggtatccggccggagatacatgccatgcacagcggttccgttatgcatattgctctggaatccccgagttgtgagtggctcccacgcccaactggtgagtcagtctgcaccaaaccttggtcgcaagccacaaaatgtaatgcaattccagttctgggaaagaccggggttgatcgccactcctcaacgttgagtaatcccatgacctgatagtggaccttgaatggattcgaagaacaatattccaagaccacggaagcagaggagtggagcggtgtgagattcggagttaggaccgccttccgagtgatctacaaagtacgacaacgtacacttttggcaacagattcgatgtgctacgcagtacaatatgcaacaaacagttatttcgtgcagatgtccttgatcgtctatggtgcgacgtgtccgtttgtcctttttcaatttccagattcatgcgtttctcaccccgcaatcgcttaatatgcccggaacctccggatcaaaggaatcgtgtgagatcagcagaccctacggagtacggaggagaggtgctgtaatgtttttatggccaggggcaggcaagtattcgatggctgtaagggcccgcctggggaagtgtcgataatcttggcaggaatgaattgttcccctttcctccctagatccgagggtcagaaatttggggatttttgatcataggtcaagtaactagtaaagtaggcaaatatactggtctaattaggtaggaaatatattctgtatggtatgtcctaaagtaaatagatggctaacgtcaccgcgctatgcgattggtcaacactgcaatcccaatgcaatatctctcatacgattatccgacttgtatattcaaagtttcgaccccggtcgccgtcctttagctatggcccgagcgtaagggtgcgagcgagatgctggaaccagatggtcaacatccccggtgtgcacgagatcaggggccgcctccgccagggatgtgatgccaatgttccgcatagctgtctccagctcatcttgcatgactgaagaaacctgaatcagcaaactatcaaggcaatatgtcaatcatcacttactgtcaatcagatgctccactccctcctggccatagttagtagcaaagagcatgctccgacccattcccacggccgttgcgcccagacatacagccttgaggatgtcagttccacgccgaataccgctgtccacatagacctccatatgatcaaagacctccgggcagcgtctgtggatctccaggagcgtgataatcgacggcggactggtatccaggttgcgaccgccgtgattgctgagcaagataccatcaagccccgctttcatggcgagaagcgcgtcatccgctgacatcacgcctttcagacacaccggcttgtgcgtgtgctgcttcacccatttcaaatcctcccatgtcagcccaggatcgatgaacccagccatgacgcggccgagaccgccgcctttcttgtcgttctgcgctttcgacggcgacataggcacggataagctctcgtcagccttgacgcgctcgtcggcttcgcgcttaccgggccacgcggcgtccacggtaacgaaaattgctttgatgtttggattcgctgagcactggcgaagcagggcggcggactttgctcggtcccggttgacgtacagttggaagaagaagtcggccgagggtgctgccgtgcgcagctcctccatggtgtaggatgagttatttgaaatctatccagatcgtaagctagtgactgacaatggcaacacctatataagctcactccttgcatgattcctttgcttgcgcaggctctagcaatggcgcactctccatccgggtggatgagctttgccattgctgccggactcacgaatagcgggagcttgtaactcccgccgaggatatttgtccgggcatctactgaacggacatttcttaggactcgcggacggaaccatatgcggtcaaagcatgatttattagcgtcccgtgtgatcagatctgtagctgcgctggagtagaaggcccaggtcttcttgctggcggtttttgaagcgacgacctcgaagtcgtgcgagttgatcagtgtctccaacgggggtttctcgttttctagtatcaccttggcactctgccccggtggtggtttgacccactcagcgtcaattgtagattcatcgaggacgcccttgaacttctccgggtggagattgttcttcattacgctgggtgcatggacttctgaataggctttcgttgcatctctccctgcatgcttcaggatgactattcgcgaggtacatcagatatcgtgctgagatcgtgcatttgtcggtgtactaacttgcagatcctccgggatgctcttctaaaaagtcggtcacatcccacacctgtttgtcgaccacaacccagcagtcgccgggcgttttgtgctctgagatctgctgagcagacagaagtttttggtctgccattgctgtcgggcggtatgagcgtgcgtattcttaggtcagctgtggagaaattgaccgcgatactaaaagacgccggtcctgtatgtcgaattgtgaaggagattgaatgagtggagacaattcgaaacagccatccacagcgagctaaatactcagcaagggtcctgggcggggatggccttcggtaatgtccccggacttaccccggactgcgcgggctaaagtctcccgagctttctgtcgagcatctaactttctatatgtagtgctgtatgttgtattcacacttttgaactggtcttggatgtctttaggatcaccctacgcaatcagccccagacgataagaacagcaaaagaggttggtgttcaatctgagcttacacagaatcactcatgtttgacgaaatctaaccccctaaaggtgtctcgaatcggcaacgcaccgactggactacggatttcgctccgagcggagacttcgagcgggggtgagatatgcctcctgaaatgtcaggcatcattcatcaccagccacattgaatgcctcagccacaatgcggctgagaactttccgaccggaagtcaacacacatttcatgctcgacagaggaaccatctcaacaacacaataacaaggatatctactctatccatctaatgccagtcaactctgctgttggctgtgctttgaaaaattttcgccgcaatatcacctcgggtgtgaggtcaacaggcatagatagacctgtttcgttaggtttgtcttgtgtccaaatacaggcttaccacctagtctagccgtggaggctgagtgatctggcaaagcttggactgactcatttcgtaggttttcataagagtcacagcttgactggtctgtcttctataaattccatatctgctggaaatcccaggacaatctccacaattgaaagacaacagaccacattaaaaatggccgaatctaaacctctccgatatgttgatgtatgtcccctttgtttattttcgaaatgctagtcaacacatagctaactatgaaacactagatcggtatcaacttgagtgatcccgttttccgcggtaaatatcacggaaagcaggcccacgaagacgatctcgacgacgttatccagcgtgctcgcgacgtaggctgctcaaagttcatggtaaccggctcagatcttgtagaatcgaagcacgctgtccatatcgccagcaaataccgtgagttatgagcttgcccggactttccctctcttattaacaacggaattctacagcgggcttttgctatgcaaccgttggtgtgcatccctgtcaagcaaaactcttcgacaaatacccaggcggcccagacaaaatgttggccgagcttcgtactctagcaattgaaggcacaaaagccggccatgttgtcgcattcggcgaaatcggcctggattatgaccgactgttcatgagcgccaaagagccacaactcaaatatttcgaagcccaactagatctggctgttgagattcagctccctttattcctccactccagagctgcaagcgaggactttgagagactccttgccccgaggcttgcaaagcttcccaagcggggacttgtgcacagcttcacgggaacaatggatgaaatgaaccggatggttgcgctgggccttgatgtcggtgttaacgggtgcagtatgaagactgaggagaacctggaggttgtcaaggctattccactcgatcggctacaaatcgaaactgatgggccttgggtatgtacttttcttagctttgtctggattagtcgtgactaacctatcccccagtgtgaaatccgtccttctcatgcatctgccaaacatttagatggtgcgccggatctaccgaaggctgtgaagaaggagaaatggcagaaggggtgtatggtgaagggtcggaatgagcctgtggccattgctcgtgtggctcatgttatcgctagcgttaagggtatcactgtggaggaagtttgcgaagcgtaagatgttgattcgtcctgatgcttggctctatactaactattcttctctccagtgcttggaataactctattagaatgtttgggttgggcgaggagtcaccttgattttggtattgccgacaagaagatgtgatgattcagggcctttgctgtagctatctaattatgacagccatggcgactgggaactacctagtacactttcgcaattgctcaaactcatggtctcagcagcaaaaatataatgatacatctcaatggtcagggtcgtaaacattatttatgtggtattatatatcacaacaaaggtatcatataagaatctaaagataatcagccattataatgtccgcatcgcatgcctccatatcctctcggggatcataatctatcacgtagttttccggataatccgccaattcgccatgatccgagagaagcatagcatcacggtcaccgtatgaagtctgggaagacccagttgtcgataacaatgtatcaagagatatttgcgtcgattccccgatgtctgtgaagcttgtctcgctgaaattgtccaaaagctggtcctcggattcgctattcaacaagcacacgtcgctttcttcattctcgtcgtgatattttgtttgagaagaatgacactgtcccggattttcattatcaggttgatgctgatctatagacgtaagatccacgagctcgtctaatccagccagtgcgttcgatggaaattctgtgaaaagcatcgaaactcctcttcttctgggttttattctgggcacattgttctgcgcgacacaccaaagggatgagaggactgcattattgcaacttggaagttgaggctgtatcgccaagtcacccgtctgatgggaggaagtgagctctagcaaatctgccaatttagctttggtggatagattcttgtttcctaccaccaaagacgatatggctttcgtgatcattggaattgtcactcctcgctgattcatggcctgaataaaaattaatacccgattttcatgatcgaaactgggaactcacatcccgatatccaggatcgaaaactgcgggaaatatatccgcgaagctcttgatcgtggatttttgtgagacactaaccgtgggatctttgatcgagttggaaatgattagtctttggattccaagatcgaacagtcggaagagttcttcgcttgatggtgatctttttccagatatgcgaacagtctgttgtctaacagctgcgtaggaattctcgtcatgcattggcagtaggattttggtttctaccatttcctctaacacatgaggactcgagacaaccgatgttccttgtccaagaagactaacctccaacacggaacagtcctcggcttgtgatacatctttggcttgaaagcgatactccagccgaacgtcaatcgaagccaaggtagctactggtacaccagggggaggacgcgcatctgggggattggtcatcgaaccaggcaaagtccgacccgttgtgtggttccgtgctagacaccctctgtgcataccaagttggaggaagtggaaaccagaagtttcaatacaatatctcttgagctcaactgaaaatccgagatccgaccagatctgaagcaaggaagtcagtctccaatttgagaaatattttcccgcacacacctccatatcgcaaagtttgtctctcaacttcgagatgaatgccgctgcttcattttgatcccaatttcccccgatccagaagcgcaactcaagctctggtgcctctgttatccatatactttcaagatttgataattgtgagaggtcaattggtatttcgggagttggatgacttggcgattggttgaaatgagccgatgcggccaggcgaagctgcaactttgaatctcggattcgcaaagtggatttacccaagtcgagcgtttgtgccattgcagaagaggctcatcaccaaagcatcataccttcttttggagaccggaacagtcatttaaacgagcgatttggggattggtggggtgttggagagggatggatgcggctacagtacatggacggggcacatgactttagactctttccctgacatcgcgtgcatccaattcttaaatatcactttactttcctgacatgtatttgggttttgtaaaggctcagctgaaaagctaaattcttgttatagatcttgcttaaaatggaaattgctgctgagatctgctcacggcttaacagcaacacatctcagactggcatatgtgatccattgactcccatcttctcttgtagtcccataccggagcattcggcagatctgctctatcgcactattcttcttctcctcggtatccaagatatccagcatctgagcgccgattaatctcatgaatccttccagtccaccgttatcagaggtggtcagctccagcggttgggggttaagttcaatcatcttaacctgaaacccgacactctcaatgatcttcttcatatagacgtcggacggataaaaccaggggcacatagcttccgccgtctcgattggaactccatggttgacaagggcgaacatgaatgctgtgaccttttctggtgcatttccatgtccgcacatctcaaagaagaacgtacctccgggcttcattgattgaaagatattttccaatgtggagatacgggtagatgggtctttcaagatccaatggaatgcagcattggaagtgctaaaattgtatcagcagggttctacaggaagtggaaacacggatactaacactttatcccagtttccattcataacttctgcatattcttcaaggtgccgacaatcgacaacgcggaaatcggtggtcgttccaccgtagtccaatgtcttggccgtgttgatcatggatggggaagagtcaacgcccataacataattgaccgagggagcaaagctggtggtaaacttgccatcaccacatccaatgtctagaactctgtccgtagggttaaattctatgctttggatgagagtgtcggcaaaatgggggacaaaagaagccgcagctgcatatgtctagatttggtcagcgcagacaagacaaggcaagagttcatgaccacagacctctgtagaccaatagtcttttggaggaatctgtgtctgggtcattttcaagtgtatccaagatatatggacttcgtgcagatggttagaagaagataggagcgcttagagaacggtatatgacttatttaagagaatgtatatttctgattgatgaagcgaatcttcaggctgcaatccgctgttatccgagtgccgcatagatttctcgcgtggtcttacaagtttaattaggttgacgtggcactcatgggtaaaaaccaacaaatatggagaggcttcagctcgccacaagtcagtaccgtcaccgccacatgcatcgaaattcagaatcatgatatttgcagatctctgctttagccagccaaatcaaaggatattcacgttggtggagcaagccacacaggatgatgagctttgccttactatttttctatttctggggactcctgagacgagaggcatactttgtacaaaatgaggtttgtaagcgccaatcatgaacgattttagtttctctgtctcgggatatcattttacgccttgatcggcattacagtcccattctaagtacgatataatagggtaactactcatgtgaccagcccagcccactagagatcacttctcgatagcctctcgggtgtgactacgggaagttccgtgtggaccgagaaatagctccagcgctaaactgcgctaaactgctctcgactgggataacttggcatgcatccacaaaatatcttcagctcatggcgttcaccggtctgttccagtcgtaatctcaccacaccgacatcatgcataagcctgggcagtatcaaaatccatcagtacgtgaatacacagtagccggcagatacggccgagccagccactttcaatgcaggcagtcaccgccacatatagtgaggttaatttagctgacaacgccccgagcaattaaacgtaggcagtcaaccaggtcatgactaatttttcgctatcagtgtattgatattaatgccgatcagcatagtagaactttatttaaaccccggctacattcaattcagctagccactgaaatagtaaatggggcaacctattgacagaattatcgtttgcagctggtagggcctcggctgagatttccgcggaagatggcccgggagataggttttagcccatccgcagagttcatagactcgatttaccgctgatgtatatatccgtcctttgatatcctaatccatccttagattctcagaatctgccagcatgactatcgaagtaatgtcccatgagccatcccctatcaaactcgcctccctcgcatccaccatcaacgaagcaattttgcaatactcacacgctgagtctgagtcagagagaatatcagctttaaaaagcatcgatgtgacctcccagaagcttgcacaatgcgcagtggaaccgagacggtctctgatggcgtttcacttccaaccccataaggttctttgcgtgaggctggccatcgagatgcgcctttttgataaccttccaacctccgctcctttcacggttgagcacctagcaaagcaagcaggaacagacttggaatttactagtcgcattgcccgcgccttaggagcattgaacatcttcgaggaggttggagaggatacattcaagcagaccgccttgtctcaagaatggaacgacaagttcatgcagtcatataccagacactcatgggataatgttttcagacccatgtcttcatacattgagttcttcaacaccacgggtttcgtgagcccctctgaccgactgaacacgcctttcgcatttgcgaagggggccaaaaatgtggattttttttctctgctacaacaagatcccaaagctgcaacaatatttaatgaagcgatgacaagcttcaaagaccccctaggtgacttatacaacttcagcagccttcaagtcgaagaggatggagtcgttctagttgatattggcggtggaaaaggccaaagcatccagagcatacaatcctcatatccaaacctcaaagggcgatatgtcctccaggatctaccagcggtgattgcagctggagatagggtgtgttcgcccgaagtcgaagtgcaaccttacaacttttttgaagaggtgcagcccatcaaaggtagatagacagagttatatttggacttgatatgatatttgcttatacctgttatttaggtgctgcggcatatctactcaagctcatattacatgactggcaagatgcagagtgcagaacgattctccgaaacttagctccggcaatgaggggttacaaatcgaagcttctcatttgcgatattgtcctgacagatactcggccagacacacaaaaggttctttatgacatcaacatgtttttcatggctggtaaagagcgcagtgtgaagcaatggcatgctctcatggaagggactggattccggattgaaagaattattgggctagataaccctgttcgcagtatcattgaggttgtgttagatgggtagtcattgtttttctacttttctgaatgaatgagaaaagggtcctttgtatatatactgcagatactgtctaatttttcttgtgccatggactgtgccttttaagcctaagaatattgtatagagtatactggcttaggatggaacctaagccagtatactctataaagaggaccacaatcccaccccactccatggtaaacctaccaataaagttcaagttgaagcctaatggtacttggactttccccggacacttaagcagctagaaacttaccacggtctagtagggtatctccgtaccaaaaatttggcgacccgcttagataggcagagctatatacgataggaagacggagctgcttaaagctagaccaaccaaggggtcctaaagggaagctttcttactaaggatactagtcgaaaacctgacgagtactgagaaagctagcttcgataatctctaagctgcgatacaatacgccctcgttcatatgatagacttcttcgaccccctcagacaactttacgccgagaccgatagttctaaggacgaaggccacagcgtaatgatcttccacgtgaagaaaggctgggcctacaccgacacgagaaaaccccctctagccaacttagtcgagccgatcatgttcctaagccgactcctctcctctgccgagtagaactactggccgaccgagctagaagtagcctacctagtcggggtactacaaaaattaaggcacctgctcctcgctgtgccagccgaccatagcgctacggtcaacatcgccgtaaacaccaatttacgctcagcggcgacagagaaccaaaatctccgtttggtcagggcagcccaatttatccagacattcagcttgaaggtctaccacagatccgaagcaacgaacaaagtggcggacgccctctccagactccggagcgaggacaacgatttagacagctttccgcagggcatcgatgctttcccggcaacaacccaggaaggcgaagaagaaccatcaagctccggaacaaacagtacggtcttcacggaactttctaacgagttgaaagaaaaaatccaatccgggtaccaagccgactccagatgggacaaagtcattcaaactctacaggaggaggaagcctccgcagatccgatatccaccaaaaactgccgtacagactagacgacaacgggttgttatatctcacacataacgacggaaccgaagccctctgtctcccaaaatccatgacaaaggacattttcagcttggttcacgaccacaaagcccgccaatgctatgacagctgctggcagagaatgaaggggttctggaattagggcctatctgagatcctgagctggttttgactcgttctaggctggggattctgttgcgcgggggcaagctgctgttgctgctgcttggcttggtactggttttggtaatgaccttgttgccaggtttgccgctgttgattttgccatcttggtggaggtaggtggagatgggtctggggttggctgggagcgaatggttacgcgtggcctgccgatgtggaggactgcttctcgacggtgatgtttggggttgcacgggtggcgttcattgggtctgtgtgctggtgtcgtctatgaagccgcgagtagagaggaagcggtccatctgaatgtccctttagacagcagccaacgcatcaacttgatcctgagtaattgtcccatccccaacaaggcgctgcagaatctcatggcaaaatctttggcagttattgacaacaagatcaaaggggcggttctccgccgctgcaatgcacagcgcgtcaagttcgtcgtcggtgagattaagcccagtggcgatttcaactgaggcttcaagtgaacgcgaggttgctgggtttatgttatccatcggctcgtaagactgagccttttttcagtatattggagtttgagaataagatataagtgcataccgtcgtcccgctcagcagggaagccttactcgcatgaaaaagggttccggtcgctgctggggcatcccagagaaagctgcacaaatattagaattagaattattcaatattgctccaagcttgagacttacagagcccaatgagccgtgtcctcggggaaccagcgggattgattgaagcacaacagagttgatgttcttgtcatgacaatctagcgagctttgtcttgttgagcagttaatcgcgtgatacgtgtaagacggaagattgttcagaagtttggtagagaagagacgcgtcaagaggaagaatggatggggacaacttgtaagtaggagggtcacgtagctgggactgactagagcttggagttgtttgtgtccatctgtccaaggctttgatatgtgccttcactgtcacaattattttgccaagttcgaattttgctggcctccaaagctatagtttgatattattaagatacaaaactattcctagttgatacaatttcctagagtgttgcagttttcaatccaaatacaatatgggccgagtttatgctttggcctttcatgattgggactcgttccttccctttcgggctcgcgagtcacttgctccttccctctcgagggaagtcgttccttccttgacagtaagcgagcaggctttgccatgggggtataaaatgtataaaattcccgccgtagctctgcgttctgttctcttttctttttcttctctacgtttagtatttcgttagaatgtactctttcttatcgaattgacctgatacgtaacatactccaagccttacagtacccgagattaatatgagctgatttggaaagaaaaatagcaaaagatgacaaaaacggactaagctttttatcaaattactggctctatatgcgttggttgattctcccctagaacatcttccttcattactgctatcctttatcctaaaacgaatatggtttcctcagctatagaacaatttcaaagcctctgggctgagagagcgctgcaacattaccgggatctctccatcaacttagacaagcgcccttataaactagccctcccctagggccacactggacaggatcgtggccacgggccatgaggactttgcccaataccatgagctgttcagacatgaaaacgctaagctggagtagtcgtgctgcgtggtgttttagtcagtttgtataatagtatgagcttagctaccagccaggcgattccgcttcgcccaagttcacccaaaggacagagtttttgtttgagatgtaactaagcgctcgttctctgagtctacgcatacattaacgctaattctaaattccatattattataagaagcgatacgtgcgactttctgatcgaaattcaatataaatccctcaggcccaaggacgtcaatgccagccgggagcttggcttcgagatcttggacgagataggcctcaattgtcagtttggctgttgcctgtggacctatgaagtagacgtccaactctatccactcgttcgatatatattgggattttatgccgctgaccgaaattggttttggcagcattgtgactagggtatctatcttttgagctaccctgagtcgataagagtcatcacgcatccggaacctaaataagctgtaatgcattgatcctaaagctactgtagccgtcgcatacctccaggcacgaaaagcgtatcctgggctatgggctttgacgcggttagactcatacaaggggagggagccgtcaaacaaagctggggctacttctaaggtcgtcccagcggccggcgacttacagccgtatagatttttatagagatcattaccagattcgaagctaaagtcacaattcaaacaggtaacagagagctgggggtggcaaagctgtgccgtcgcccgtaatatagccccggatcaacttcacgttccgggacgggaccctgcggcgcgtggtctggtttgcatgtgacttccttctgacgttaaatagcaactactacttctccttctcctaagaatcaacatcctcttcatttaacaaacttcaactcacataatcatgcttgcccgtcttaaaaacatattcaccccctccaccaatccttccgtacttcttgttgttggcaagtttggtgctagaatccatgttcttcatcttatacccgaggacggcaccatcgaacgcttttgcctcgtaatgccatcttcgtttactaccttccgctaccgtggagccagagagctatcgcgcgagcagatcggcacagtcacgcttgacgttggagatggtgtgattggtaataccttcctcgacgacgttaagacacgaatctacaagctacagaatgattccctaagctcgagcccggcgcagctacagacaggcagtactgaggtaactcagctcgtgcaagacgtccttcggcccgtagcactcgatgcgattcatgaaagagaggggcgagatcgctctatgcgcgcgacagagacgtaccctgtttttattatttacatcacacgcagcccagggaggagttttcttgagatgacaagctatccttaatgagattccatcatgaaagagaggcgagatcgctctataagcgcgacacagacttaccctgtttttgttgtttacatcatacgcccgagcgcagggagactgactgagctgacaagctatccttaatgagattccaccagttcttttgctcaatatatgaatagtagttgtagtgatttgaaataacattatatgcatcacagcaatatattggcacaatttttattttgtatgtggcttgcttttttacaattctgtatgaatagaagtagttgagcatgtaggtagtgcagctagtcaatagagtaatagcatgcaatacttagtctctatatcaataaccattgaagccttgacaatgaatagttctcgtactcaatgaactatgaggcagaactagtcttttgtgaaacatctgataggccggtttcaaaagtccatttgcagttattgtcgtatccctgcgcgattctctcaacatcgacgacagcatcccacgccgccaacgtcctcctatatcgttcctctccatcctcgacattgacagcgtccaggtcttcctggcgcccagcatcgcactcgcagcgcaaaacagacctcagcacgtctagcagttccctcctccacccaggttgatggcccccggacagccgtgccgcgacgtactcatagtacgcgggcatgatgttggccatctcccagtccaggaaacccgtcaccgcgagtgtgcacgggtccacgaggatgttccggtcagacaagtccccatgcgagaggacaggacggtcccaatcacctgggccggtggtgtcacgctgtactcgctcaagggcgactgcacgttccgcgtccgggtcagaggcctgcagcgcgcggacgcgcgagtcatcccactctgagcgggaggcgcaacatacatacgtctctgtgccaaattcggagaagaggacgtacggctgccgcgtaggccggccgtagtaagaaaagtggtgcgtacgcatacgcacgaggagacggcagagctccgccttgatggtctggcgctgtagaagggtgagagagggccagagctcgactagcggcgtgcctggctggcgaatgagaacgacgccctgttggatgcggttgggcgtcaaggcgttggaggttattatcggaatcgtgacgacacaaatgacgcgtgggacacagaggcccaagatggaatgggcgagcgcggtcatcttgccttcgccatcgtcagcgcccagtttgaggatggtagagggagaatgaataaaaaactgccgtccaatatttagaatagtcggcgctgagaacagagggaggctggggagaaaggcccagttctcccgaggaagctgctctggttcctgagagctctcgccatctagtgtcattttgagcggcgatgcgtggggagaagtccagagtatcaggcaatattaagggtttacttagttaagtaacctggtgctaaagtgcgatgtcctctaagataattgattgattgcggagcgagcgaagcaagtataaatcacaacgtcctatgtacgtacgtatcacgtggctaaattacttatctaggcccttctacgcatcacaccagactaataatgaagacaagagttctttctcggttgtagcatttgtcttgtatatattcttatacaatagcgacagtcattcattcacgactatctccagccaacagattgatttcttgccgtacgaagcaatcccacgaggaattgactgtctagcaatattcaacccaggcatcgaggttcatgttcttgatgacagtcgagaacttgccggcgttggctgcgttgcaggctgatgtcttcaacgtagaggagagaacggctctagctcggagcttgtggtgaccgtgtccgtgcccgtgtcggtgttttttctccttagtggcatcggtgctagcctcttcctcgtcgtcttcgcgttcgtcatcttcatcgtcttcgtcgtcgtcttcgtcatcatcgttagtgtccgcatcagtgctgctagtattggtgtcatcggcggctgtgctggttgcagcggcagcggcagccgaggtagaagaaggtatgacagcaacagtggctgttgcagaggcagcggcagctgaggtagaagaagggatgacagcgatagtggcagtggcagtggcggtagacttgctatcagtggaagtcttggtggcagtatcagaagtatcgtcagagccgtccgactcaatagtctcgtcggaatattcaatatggaaaacagactcatatcttatcaatagatgaattgccgcaggactgctcgttgtatgatgctatcctaagccgcctactattcatgttcgtcgacgtgatttgctgttttgcagatgatcttggaggccttgatgccgtacgtgatatcttatcagtatgggtgcgtatcggatcggggtcttcacgctacaagcttgtttatcatctaggaaagtggctatatcggcaagtgagatcaaggcaggtacaccgtttatattctcatattataacggcgcagcaccccacagagtccaatcaggtctgttatctaaaattgttctcattaagctaaaaattatactaggatctttatagcatacggtaggcttagacctgacagcgagagtgaaccatttgtctagtaagtaaggtaggacacaggttcggaaggctacgaaatctagaaaagcacagatcataagagagaggttgaagagatgtgcgactagaactatattagcgtggatccctgaatcatcacgccaactcgggccacacgcaacaaaatgtcccctaggttggcaagtattgcgccttagtatctgagaacataagaaccataagctgtactaccctaatataacttagttagatcttatattaaagtggattcagaatggaaaatcacctcagaggcactgggtaattagctgtgaaatttctggttccacttgcaataataaaggactatcccggtcagtgaacgacctctctagggctacatagcagctatagagaatgggtataatatataatcttatttggtttcctccatttcatttgcagcacattaaaagatctttgccgctccctagtaatatgggtattgaatattaaggttaagttctcccaggtcttgtggcagtaagcttgatgggggaagaagatgatactattatgacccctctggtgggggtgccatggctaaactatgactaagcaggctaggcctgtgacaggtcttatatggaaattgagcgcggagtgagactagtaagctcacctcagaaggtgaccattttattataactttaggaggaaactggttagaacttatcgttaaagtacctaggtaggcgcccttgattataaatcgctggactcgttataggtatctgtacagtcaaggtaccagtaaaggaaaccttcgataactctgagagttatattcttcagctagtattaagggtctagtgggataaggcgttagataaaactatattattagtaatagctgggagaaaatctaataaagcaagattaactaggataaacctactttttgaagttgcgatctatatatcctgtcacgattggcacttgcgggactcgtactttcccgtttgggattgtaccgttggtcgtttgcgcaggcagtcgcaccttccttctgggggaaacgagaatagggctttgtccctaaaggggtataaaagcctatttgttgttttcacgtttgtttcttttcttttccttttccatacttgatattcgattagaaatgcacttcttttgttaaaaggaatctggcacgcaannnnnnnnnnnnnnnnnnnnnnnnnnnnnnnnnnnnnntctttccttcccgttcgaaggaactcatttgcgcagacagtcgtaccttccttctgggagaagcgaggatagggctttgtccccgaagggatataaagacccatttgttgttttgcgtttgttttcttttcttttctttcttcatacttgatattcggttagcaatgcacttcttctgctagaaataacctggcacgtaacatatcctacggatttcagtatagaatcggtaaaatccgcgttaacttccggatcttcttattagatgaataacatccaatcggttttattaagcttagcttcacttttcttcggcattttgccggtagtatagttcaatgttattagaaagtagaacggccacgccgaagatatggaattgtttagggatgatatctgaacgaggacttagactgcctttatatcttttatccataatgtacgcgctgagggcgttgatgtatgatgaatacttactcctgtaagggcgctaaacctaatagtattatattcaatgctctaacgtgagcgctaggtgaaaggaccacgatttcccctcgaaagaccacacacaaatgttgtcttttcgccgtcaccccgacttactccatactatacagtggagtacccgtgacgtgcatatggtgaacctcggaaccgcggtttaaccgccgttatctcttatcgtactcccctatcgacaatctgtcacgtgtggccttaatccaggtggcctgaaagtaaccgttacacttccaactatctacgctcagcgatgccaggggatgagttgtcagaggatcacctgtatgcccggaatggccaggatgaacatgaagcccaatccctcctgtctgcttcaagcgaggagcatgacctagctctccatccggagcctcttccgtcgccgatcccctcacataacgcgacaagtagcatatcccactccgcgatttctcaacctgcaaccgacggaaagcgccgtacaccccgtaccatgaaccgagttcgattcgacctggacgaagaacctgaaaacaatcgcatttccattgagcgtactctcagcccggacgacagtccagatgacacactatggctggaggacgaggactatgaacttggaaaccgaggcccagggacacaccacagtggacaatcaattcctcttctcacaaatatcgaagcgcctagtgtgacacttgcaacgtcggacgatttcttccccgaagatcatctcgaaaatgcgcggccgcggagtgggatgaaaatggcgttcatgaacatggccaacagcattatcggcgctgggattattgggcaaccttacgcgctccgtcaagcaggcatggcgatgggaattgtgctgctgactgccttgaccgtcacagtggactggactattcgattgattgtggtcaactctaaattgagtggggcggattcctttcaggcaactatgcagcattgcttcgggaagagtggtctcatcgcgatctcagttgcacagtgggcatttgcattcggtggcatggtcgcattttgcattattgttggcgataccattccacacgttctaggcgctttatttccgtctcttaaggatatggccttcctctggcttttcacagaccgcagggcggttatcgttattttcgttttggtagtttcatacccattgtccttgtatagagacattgctaaggtcagctcgttccttccttactatttatcatagactaacagtcagatagctggcaaaagcatccgccttggcatttgttagcatgatagtcattgtcgtcacagtcatcacccagggctttcgggtcccgcctgaatcgcgtggagagatcaaaagccacctcgtattcaacactggcttttttcaggctgtcggggtcatttcttttggtaagttttagctgccctgtcaatacttggaaagcttctaacaatttccagctttcgtttgtcgtatgttcctttttatcctactgatatcccaaccactaatttccacagaccacaacagtcttctgatctatggctcactgaaaaagccgacactcgaccgtttcgcccgagtcacacattactcgacaggaatatctctggtgatgtgtctagcaatgggtatcgcagggtttctgtcgttcgggtctaaaacccagggcaacgttctgaacaacttcccatcagacaatatcgttgtcaatatcgcacgattgtacaatcttcccattgatattgatatagagattcttgactgacttctattagctgctttggcttgaacatgttgaccacgctaccgctcgaggcgttcgtctgccgttccgtcatgacaacctactatttccccgacgaaccacacaacacggttcggcatattatcttcacaacggcgctggtggtgacttcgatggtgttgtccttgataacctgcgatctgggaagtgtatttgagctcattggcgcgactagtgctgctgctctggcttatatattccctcctctctgttacatcaagcttagcagtgctacgcggcgagagaagatcccagcatacctatgtatttgttttggtgtgcttgtgatgggtgtcagtgtagtgcaggcggtcatcaagatcattcgaagtaagtgtgtcccggaagatggttgcaattggacccagttgatagctatttggtcgcatcctccgcaaatatactaacattgaaatttgcagatgatggcgaggcccatagttgcagtgcacgttagagggaagggattcctcaaggactttccacagatagcggcgacttgtactctcggtgtgctcgaaaagcctcttggagccgtgttgctatgtatatatgtatccattttgaacaaatagctgtttcctatcataccctacaacattctccttcacaaatggctacgtgccgtttttatgtagaaatggattgcgacgtctcaagatagctagcaggtagtttgatggatactgtgtgcccaggtgagcagtatgtatatactgtgcagttagactaagtacggtgaagtatattctaggcacgtgcactttgtgatttaggtatcgcaatccgtctgcttcgtttctcattttctactactccgctcactctctacatccccaaacaccacgatgattattaatgtcattctaacgtatatctataggactttactatgacgtgtatacgtgactcgcacgtggccatctcgcacgtggccatgccagatcctaaggccaaaagacttccacagaaggtgcgatggacaatccgcgcaacatcaagaacacactatgcagcctcgttgctacccaaaggagcgataccctcatatgtttgtgcgttcacgcatgcgtctttgatccaactggctctgatcgttcctttatttacctccctgccgtcttctctctttcttccttctacaaccactctctccctgtttttctcttcacttcttctctcgtctggagcggctctcacagttctcatctcgggtgctttgctcaaatctgcttgtccgtctctgtttctttcgctccacagagtcccaagtcctcggagtatccccattggtcgcctgtcccttagggaccttgcttgtgcttctcaagcttcattttatctttgtccttctttcgaagcctccaaggttgctttgacctgcagggacgttctctctgggatacaccatcgcccacgctttaaccttccctcccactcactcctctcttaccttcgcgctttggccaaccgaggcatagtactaagccggtaacacgttgacaacgacgtgtcgcataagtgcatctaatatcctcattaccgttgttcacatttcacccgccacgggaagtgcaccggcaagatgagcgagtccgcggagcagctccgccagatgcaactgcttcaaatggtaatatctagcctctcactcctatctagcttccctaactgactgaatcaataggcggacctaggaaccgctcggcgtgaaatgatttccacagacgagatcaggaaacaggctcgtgtccacattgccgatatcgaatccaagcgacggcttgatcagagagatgaagctcaattgagcaaatgggcaagtaagtactgagaaagaaacgcccttgagcccctctaggattttactaatctttgtcgcagatttgcatgctgagatcggagatactagtggaatggaggaactcgatgacatagaatgcggccagtcccaccgagctaatttgcacgcgatgttgcaccccagtggaggtcagccgcaaacctacgcaaaccacctttacccaactccatctgcaggtcgcggtggtggtgttatgggaaagagaggacgaggtggttttgctcctctccccaggggacctactaatcttcccccaatccctccaaggtaagaaattgatttaccccgacatttcagacatccaaattgacggtgaataactcgcagaccctcctttcatggaaatgttacacttccaggactcccaggaccgcgcggtcgctcggctacaatgtcggccagcattcatttggaccctgcgttaaactgcaacaacgatgacagcgatgctcgagatcgaggaaggggacgtgggcgaggcagaggcagaggaaggggcaacgcccaagaacaggttcacagtacgttttgatcacgggtacagaaatagaacacagctaacaatattcttagtgccgccttccgccatcaggcctcatcgggcatctccagcgtaagtgatccggcttctttctcttggtgagattaagatgctaacttcttggccagcgtcaacttcgccactaaaatctctgagcccggggacttcatgtccttatttcagtcccgccgggcaactgaaacgtacaagaagcctaccgatacaatcgtctctgctccaattccgaagactacatcttcgcaggaatccattccacccaatgtgccaagggtgaaaatgcctccgagcgatacacccaagaagaaaaaggcgagcattcttccagttgcgaagcctgcatcatcgccagtggcaacatcgacaacgccatctcgggttgttcctattgagacgactacatcgttccaaccctccacggcccaggctactactggaaccaagaaatctcagccacatattggaccctatgaggtggagacgccctcacggtcagcccgtgttgttcctcttgagaggaccgcatccttcaaaacccgcaaggcccagcctgatacacccaaatcttctcagccacgtaataaactccctccagtggaagaacccaccccacccccaccccattcggtttctgtttctgtcaaacaaggcggcaagcccaaaaaggcgaaacacatggtgacggattctcagcctcttccagcaatggtcgcaactgccacggataaaattcaatggaaggttttgcctggcgaagagccacgaaagaagagcacggctcctccaagcaagacggcagtctcattggaaaactctatgcccctcgctgaggccaagaagacacccgtcaccaaggtcactcaactcaaagacagcaagcagaatgttcagatggaggaaaccaagcataaaccccaatctcatgatcttcttagcgatgacactccggttatgacaacccctcgccatttcaatacagtggccatcaagccacccgtcgtcaaggtcactcgactcaaagacagcaagcagaatgttcagatggaggaaaccaagcataaaccccaatatcatgatcttcttagcgacgatgacgccccggtcaattcaacaatgataacccctcaccatatgaacacaatggccgtccacagtccaggtgctgcagaattggcaggtctgaagtttgccgagaaggtcggagagtcggtgccatccaagagcattgacggagtcattgcccctaaaacaacgatcaatgattcaagtcgagaacttgacggcttcggtctatatggtccgaaaattattgaagaacttcgcgacattcgcaaacacattcgttcgccccaagagttggctactgcacatgatatcgaacgcatactggaatctaaattgcttcagttgattcctgaagcacctccaccgcctacagcacctgcatcatcggatatagaaggtcggctggggaatctgcttgcacttgtggaatatctttccgcatcgcagcaaggaactaacgctgttgaaatttcttcgactgcccggcgcgatattactccatttgaggggcaccgatcgccgcctcccccttcgtctagttcaaactcacccccgtctgccgataaacgcgcgcgcaaggtacatgtgcccggcctctcgccaaccaatagtgagagttccgacgtaatttcacagttcgagactcttcaggtttcggacaaactcgccgcgcccctccaaccgcagcgtgtggtcccagtcccagctcttcgtccgctgagaattccgaagaaggctactacatccgatatgtccgttcaggctactcctgctctgggatcacgtgcaaaggaatcaacgaaaaagccacagactctgaacgattcgatctttgcaggatctgtaccccttgtcactcccaatgctaacgttattgaacctaatgcggtgcgttcccagaccactggtcgggtgttgagcgcaaaccatccaaacattcccaagcaccaggatttccaggcaacgggcgctcgtacaatcggccctgcgccatacaaaccccgcgtgattggacctgcaccctctgcctatgagccaaccacgttgcgcgatgtgccaacagcccacattcgtactgtttccgttcagcatgctaacactgagaatcggccctccttggatgttgcaaaccgtgcttcgacctccatgggttacttcaatggcccagcttcccagcaagctccgggtgaactgttctccatgcctgaccctgcgacgattctccagcccaaagcgaaggcggctggtttcttcacttccaaccaatctcgccgctaactagttaatggcttctgttttccagagtctgagtttcagtggatttcttcttctactagcctcagccagctctgatcatctatggtctctacttcagtttcattttcgtcttttctatggccttgttgagctttgagatctttgctttccctggctgaatggttcctatttcagttgttcaattgttcaaaagcgaaaggtcaatgatcgtttaacgggtcttgcgtgattatcagatagttgaagctctaatcaactaattgttgtttttttcatcacttgatgtgaatgtaggtagttcattagggatatgagccgttgagtcagacatgcaataatgcagaggaagaaagtaaagtgctgtaaacatgacctatcactacgtaggtactctatcatcatacagcgcaaaattacctcgctacaaagaaaagaaaaagcaaacacgtttcagattaaacatccgcctagactattgcacccaacccgaaataaagaagacctacttccgaggtggacaagttcggtatatccgatctgcattagtcggggaacatgcctcccgttccggtcatttctaggacttttgcactcgaacagacctgtcacagtactttctttttcttctttcttttctttttgatgcactgctcctcaatgcagacacagcggtcaggaacggaacccggaagttcaatcggggaagacaaagcgacatccggtgcaaagtacataatggccaaagtacataatggccaaagtacgtaacggtatatattgatatcgacatgtagacttgacgaggtgtgatttgcacggtctttaaagaactagcctttgctatttgtgatatgttgaacttgtagtatggctctatagcatgacgtatcaaaatcctagggttgattctataatggcatatagatggtcttgtggagatctagttataccctgtcaccgaattatcccatctagatatcttaactcaattggattcagtcaggcacggctctgatgggttggatataagattacttgccttcgaagctatatgatccacgcctatacggctgctgtacatcttggccatatgatcttttccaagtagggatgttgatcatgattccctagagagattacgttagaaaatatcatcaaattttactagagcctcttacttgtgtaactgtcgagtctgtggtatgccctcgctctcgatgaaccctggagtatagaaaaacagaggccagagcgaagaagacgagactgagaccggcagcaatagtgtttgctgctcgaaaaccggtccaggtaagaccaatcaaggaagtcatctttactcgaatagtatccatgagcagtgtagtttgacaatgaagagcgatattatgtctcgataaacgtggattcattcttctttaaatatactcccatcatgatatgtgacaatcaccttcgcacaagtaacaagtcagtagccctagtctactactacccatctcggacagtgcaggatatcaatatcctccaggcaccacaaaagcaagaagccggagcatagacgccgatcagtcaactcgtggcctctaccgatcatcactcggagtgtgtaatgcaaagaagaaaagaaaaacaacattaataaaaacaaattgcaaaaagcaaagaaagtaaaaaaaagcaaaaataccaaatcgcgccgcatccttgagaaattatgccggctagaattccaccgtcctgcaggcaccgccaagaaaatcgagaactgttcattgggccttagaccttgtgtttcctgagctgatgcaccaatccgttaatgccagcgtaccgacaacgcgggctatgggaactgctatccggtgccgcgggctggcccttacccatgcacatatatatgcataggggaacacccgggtgtttcttgtggttcgtgtctatcagggtctagatacttgctgtcatctgcgattggttctggattcgttcgggactttcccgctagccttcgaagcacggcgggagtagggacagaaggtcccggtagacgttctggttctgcttgcctttggcatcaggcttagggccagattttccaatccctgttcgtaattttgtatcgaaatgatgtcaattttgttatgattggtatttctgcggatcaacataagcctgtggtctaagcctgccattgtgttcctgaagtcctgcatgctccagattcggtttaggataacaaaatagaatatgctaatgtgaaggaatgtatcgataatcagtatccccgtccggtttccccgaataggatcctgtgggtccatttgcttcgaagactccggaaggcctgtcatacttccccgccgtgataaccatattatggcgccgtaggccagaggtgaagctaaaacgaaatttcgatgaaataggaacgcttgtagttgaaattgcgcattgatgcactctctcgggtccgaaagacaaatcagatcatgttcattactgggctagtgggcgaggcccagaagaaggcccagggtcagcacctgagactcgaggccgttttgggtcgtttggacccagtgccgggaccccttgatgtgcgccagctgttccatcggcattggtgacgtccactaatggaggccgttttccgttgaggttattctggggtggcatactgcctcggttcatcatggcagggttggaaacgttcctttggtcaaggttgggccgggtcaatggtcgatacgatgagacagaagggcctctgccgaccggactgctaaccccaccaccaggagcaccgattctgcgctgcagatccgttgcgggattgacaaaatcgcgtgttgcattatttttattaatggtgggtgctggggaggcgctcgacagcatcggcctaggaataggaatgcttttgctgtggtctacaccagcggttttgcggatggagggactctcagcatgtggatcgaattgaggtacgcccgacgggacggagtttggattttcacggagaaggtccactgctcttgcagaaaagaaacccgttgacggtgtgccttgcggtggtgggttcatgtcctcggttttctgaaagccgccggggccggtttccttttgagtcggaggctggacgatgtttttgtgtggaggatgctgaccaactggttgctgtggtgggactgatggtctagggttcgcaagattttgagcaggaccttgagcggccattggtcgaccttgtaccgcagctggagacggcatagtagattggttctgtcgcacatttgagggattaggtcgtcctgcttggcccgcgccgttccatcgctctggttttgatggtgttacaacagcggggttaaatcctgctcgaacaggcggtcctcgctgaggcgctggaccgttcgttggcacggtacgctgctgttctcgaagaatctctgtgtctattacgatctcatcaggattgcccatatcggtatcagctaccccgaaatcggcttcatcaaagaggtcacctaaaaatcattagccggagttcaaccttatgtattctaatacatactgccaaactctccatctccatcaaaagaaacattattcccagaattatttcctctcgcttgatgtggcggaccagggaggggtagatcatcctcttcgggtacttgcttgggtggaggcagcggtttcttaagtggcgcgaagtccgggtgacggtggagattttcaacgtcccatcgtccctattttgatagtcagctggcacatcgcaagttggaggacatcggggaccttacaggcgctgccttgactttggtcaccttggccacataatctttgtcatagatacagttacctagcacgttgccaaagttcctcaatgcacgtttcaaagcatctgttgtgccttctttcttggccttctcaaacgctgcggccttgcctttgcagttctcgatatgtccgtagccaatatcctagaagagggctggagttagcacaaggcccacgagaattcatatcacgaatatgttcctttacctcatgaaatgttccatctctcaaggtcactctcatgatgactgaaagtcccaggctgatcttgcctgtgttctgattttcctcaacctgataagcgttagtcaatccctatgtgatgtagttgataaacataagatcaacgcacaaaatcaatctgaatcgtctgaatcgaactggaccagccattgaatccaaacacttcattcgcgagattaatgcatttgtccgcggagagatagtgcactttttgccccgctgcaccaggtcgcgcagagatgtattcgggtcccaatttcttatcaagacgcgcttgtagtgttgcaatttcctgtgcggtgtattcactgatgcggcgttggggttcctcaaatgggtttgctttagcggctcctgtagcgttcggcatcattatagatcctgcattaccccgatgctggtcaccaacgctgagattatcactatcagtgctcggttccatggggtatagtatttcgggtccggggtattggtctcacgctggcatgttttgttgtgaatgagtgtcgagtttgatattagagatgtactggcgtgtcgggcgcgttgtcttgaggcaccaggacgcggctcatcgcgatatcacatgatgataacgcgataagataaagattagagcttcagtaaacaaaacactgataattgatattaaggatagttggagattattaggtatgtggttcacatatggaagctaccattcggggtttcatcatttctcattctttgcaaaagctatctatcccttcggatgaggaagggtatgccataaatcattggatgacgagactggcactgggcacaagtcctagttccttcaaagtctcgccgaaaaactcattatcaaatatcttcttggggaaagtctgcacgaagctctggacctcgatcccatcctgttccctcaatgcggccgcaacctcaaacaacgtggtgtcgacgggcaatgtcttcatgacgttacccttggatgactggaatcgcagtcgagtttcggtataggcagaggcaggtttagacgtagtgggaccggaggaagtgggtgctggagcggcagcaggctggggaggaggagccacaccggcacgctcagctcgctgcttctcggccttcaatcgacgctcctccttgtcggcctcgattttcgccttgatacgttttttggcatcgatttcatcctgcttctccttcttcttcttggctgcctccttcaactgttgcttccgctcgagttcctccttagcatcttgactttccttggtgctcttccttcggatttcctaataataaaagtgagcaaaatacctcaatcgaccaaaatcaggaatacacacctcattcttcttcttgtcaatcttgtcctggtccgagagccctgcgcgcttcgccgcaagcttctcccgcagctctgtcagtctctgcttcttctgctcctctgtcaagggagcaatctcctccgtagactcagcaaaatcaacatgtcccgactttgatgcgtggaactcggcctgtgactggcctcggaacttcttgccacactcgttgcatactaagctgcgtggttgttcgcctggttgaagcgcagggttctcttcgtcttgtgctgctttcgtttgtgccttaatctcctccaatgacttgtcttggttgtcctcaagccactgtagtgcaccttgcactgttaagtcagttagcagatacccaactatagatactggggaaacaaaaacttacagccaccagtcttcgtcactgcgagctgggcgcgctccttgtcaaagcccatttcaatgagctgatccaagtccgatgccatgacggctgttgggacgtgataaagatgtaaatgtaaatgtaggacgcgctcgaaaaatgagcgcaatttggcaagattgaatcagataggtggttcagatgtgagttaggtcgcgagaacagagtgggtgacgtatcagaaaggcggcgagcgataaggcccacttaccttccccgggtttctatggcatcaagttcttcttgatggcgtgttttgagggatagttcgatacttgtacgccattgaaagggtgataatgccaatttcatgtttctatgatattttcgacttgtactacctatgcacacgtgtcgtagttatctatttaaatttaggtggctgtgtggcttatagagccgaataaacatgcaacttgaatatagtgttgtgcaagatgtatgtatttggcgaaaaccttcaagtaacatataaaatgtaaaatcaggctaaacggaatacgaacatgtatatatagggagggactagcatcatataaaccgaaagatatatctgctaaggatgcgtgtgctacgagataactgcattgaagacattttatatattactatatttcagcctccgagacagaagatatagactacaatatgttagcaagtgacgtctattaacatacgaggtcgaagccagcgccaagggatatgatcgcatacctcaatagcatagctccatgcatggcaaccagggaaataaggcatatatacaggctgatcccagtagaaagttcagtgaccaatgagcaaccaatatgacgaaatatatacaatttaaacacaagtgggatttgaccccactgcaagtatcatatgcgggtgaagatgtccatctgaggatgcaaggatataagagcatattagaaaagagtggtcgaactagatatatacttctcatagccaatatgccaatagaataattaaacacgaagaaggaacttgcaatgtggttatagcctactccgtagagcttgtcaatagtgacatcacctgactgtttgctgtttgctgactcatctaatttccccgtgcctaggtggacagtaatcaaactcctgaggcatcttagacctgataactccctaacgcctttattcccaatcggaacctaatcgcgtgcaatcatccacgcccttgtcatctttgttcccttctcccacctctgtcaccccgaccacgtgcatcatgaccatccaaatcgagccctccgagttgggcttcaagcgtgagtgctagaccccgaacctgtagacctgcctagatcacatctcatcggttgataacaggtcccttcaatcatgaagtatgccaggttctccgcctgagcaacccgaatgaggaatctgtggtcttcaaggtatgtgtgacaaaccccctcccttgatctttgtcgcagtactaacatgtgtcctcggcgcactaggtcaaaaccaccgctcctaagcagtatgtcccgacgattgtctgcgcaatgcctatactcgagtttttttatctgatcatattgtagttactgtgtgcgacctaactccggccacatcgaacctggcaaaactgtcgaagtccaaggttagtcgataagcgagtacgcctgaattttgcggcgggctaatattatccacagtgttgcttcaggctatgaaagaggaccctgctccggatgccaagtgcaaggataagttcctagtgcaggccgtcccggtctcacgtggattggaggatgccagcgttggccagattgtatgtccagagtccagcatggagaacacgaagatcaataactaatattacatttagttcgaccaaactcccaagggcgacgtggttgagcgcaagattcgagttgtctacctagcaacagatgccacttcagccaacgaatcggtattctccccagcaatcacttctttatacacatagtctaactttcaccaggtgcatgatgaggaacctccatcgtacatttctcctgccggcgcaaatttccagaccccggcccccaagaagattgactccgctgaaccgtccccaattcctgctcccaatttctccgagaagaagtcccagtctccccagcgcgagccgcaatctgctatttcaactgccaggtctgccgtgggaagtgctattccctcaaccgacgaactcaagtcccagctgtccgaagccaacgcacagatccaacgactgaaagaccgacttgcggatcaaggactgcggcagcggaagaccggcggagaggctaccggtaaagctgtgcctgctaccatgcagcagtcacatgcgccaacggcgagtggagtttccatccaggctgtggcatctctctgtctgctcagcttcttgatcgcatacttcttcttctagtctggtcttctgtttctcgctttctcgcggtctatctggcttcattgcacctactctccgcgtactaaatgcctcccgtctaacgtcgccgacgcccgtcccaaattcccatctactttttgtctcttgaagagagcatgccgttttctatctgttctagcatcagcctttttatgcgtttgctttaaattcttctgccccagtatcaatactctactttcatgttgtctctctggacttcttcccttgaggccggacatatgtctgtctcatcctctttgccgttgctttcctttgttctttaccattcctgtcttgtctaatatcattttatgataaaacggacccagcctttcgattcgttcgccttgtttcataacccattctcgagctcgggataatacatgtgattgctactagagctaactccatgtcgtatgcagttcgggacgttgtctcccttcttcggtaattggttgattgaagacattcggtcctgtctttgcgcattaaatggtcttgttgacacaggcaccggacatcatctcaactgagcgtaaatctaccgagactgatgcttcgtgtttcctacaattatgaagcctgataaaagtcacaaaatgacagcctatttgattgtaaacaaatatatctaacaagtacaagtactccacccagtaatgtatgtaactgaacacctgaaaatccaaaaccaaacgttatactcaaaaagcagaacaagatctaacattgaatctcactctccttccagccttcaccctcctcgcccgccggacccgccgactcagccgagatgccctcaccaccacgtccattccattgcttagacgcagcagaatcaccaccgcgcttcgtcccaccgccaacaatccgtccaccctgttcgcgcttcacacgacaccacggaccgacatccttatccaggatgaaagtgtaaataacccaaacccagctccggtggcaaggtagcggttcatagaactccctcgcaatctcatgcagcttatgcaatcgagtccaagggatagcagggaaatcgtggtgctcgttatgcaagccgacattgtaagtgaggatattgagcgggccgtagtacgagtatgtctccgggggaggcagagagtcgagcgggtgcgggaccttcggcttctcgttctttttcagctcggtcagggactctgtaccgccgcccttcacgttcgagaagaaatagtgctccgcgatgaagtggcctgcgcaggggtgcagggatccggcgaggaatgagctcaacacgaagtatagcactggctggatggagccgcatagtttgcttagggcgtagtcgaagcttatttggatgcctaggttcaggaggtggatgtaggtgaagggtgggctgtagatgaacattgggcgcacggcgtagaagaggatctggaaggtgcagaagaatgttttgcccaggagggagtttaggaagaaggcttccactgctgtggggaggtcggtatcgagacctgttacgccgagggatttgtggtgtgtcaggtggtagggctgttagtggtgctgtgtcagttcattgtctgcgttggggcccagctagtttccggcatgtggaagagtatacgtactctgaatgctgcgctgtacggcagtccgatggggaggtttgcgaagatagcgagcaagcggttggcgaaagccgaccggaatgccaggttgtgtgagatctcatggatggcgaggaacaggttctggttgcaagttgcaccgatcacgtatgccgtgaccaggaaccgccaatcgagcattgaggtgctgcggaggagataggcacaggtgagttgtagggacacgacgccgaggacgacccatttggtaagaggctcgggaccacatagtttggtgacctataggtacatgatatcatgaatcagcattgcaattgcacttgttgagactgttcctcgcccaggaaaggtggccaggtgtatgtaggagctccgcagacctccgcatggagtcttcacccagctctcatatcaccccgagggccctcaaaacaggatcacatacctccggatgggctttaataattgcctgtcttcttgagcggtgcggttcttccgtgtatgtccagaagaaatggtcctcgaccaaagcttcgggtgcctgtattctggtagactctggttgtgttttgtcggatgccttggctgccttggttgccgacacgcggagttgcggcgaagttgtttcaacgaccgcagacatgatggaaattggtgtgtgtcgaagtttaggccatgggagatataagaggtctcaaaaaagtcggaagacagttgttccacgtggggcgacgcgatacttgatggcttgaggcttggcaggatcggcacttgtcagggcttttggtctccaatctattcaagacattactaatgagatggatctttgaagaacgctttttatttacttatgtctatgaaatacatcagtagtcgtcaccacggctaataacttccttcacgttcgggcgcaatacaatcgtctaaacaagtcagtaaacagtccgagtggagaaattcccaaaatagaaacatacatgttcatattgggcagtgtatgagcccttgatatcgcaaagaggagggtaatcctgcacaattccagaagaaaccaggttgttcaactatattcgtcagcttcggtgtctcgcattgaacttcatcgtcaacttacgcccaaaaggtacttgtcctgacccaggcggtcgatgtaccggcgacagaagggaagggtgccaaagttcttgttgatcaaatttaacaagttcttagcggaggtaagacgcaagggaacgttaggagcgtcggaggcgagagcgtagtgcgaggtttccatctgaggccatgttagccttggttctcgacctaggacctacagtataaacttacttcctctcgcacgtaacctttaccggtactaccgaaagtctcaatggcgaaaacttcaccctcttccatcttggtctgatcggtgctcttgacgattggtacactcttgccaccgtggatgacgtgctggtcaatgttgtgaccgtttaagttgcggatacacttgacagggtgcatggtgccattgagctcaacttcgtaactttccatagcttcttggatggcggcaccgatatcactcatacggacgtcaattcccgcttcctagaaacccgtcagctctgcctgagacgaagaagagaaggaaaacttacccgaataccggtgttggtggcgtccttcacggcagcgagaagaggatcgtacactgggtcaaaagtcatagtgaaagcactgtccacaatgcggccgttaagctgcgcaccgaagtcgaccttcatcacgtctccctggttcaggaccatcttgttgcccgcattcggggtataatgcgcagcgcaatggttgatgctcaaaccacaagggaagcccataccacccttgatgttatcaccttcctccagacctgggtgacctgtcagggcgcgcaccgaatcctcgatgccctccgcgatctcagtcaaagtctgaccgggcttgatgttcttctgcgcatactggcggacttgacggtgaacctcggcaccctggcggtactcctgcaggaagtcattattcatgcgatcgaggtatcgtttttcttcgttggtagtacggtaggcattgtcgtttaggtattcgacgatctcgccctcggggtattggccgttggggaagaggttagacacaggaacacgcggtggctcgctctggaccttggcaccacccttcttcttgggcttcctcttgggcttcttcttcttcttctttttgtcggctagaggtgaccccgccgttagtcccggtcgacttctgtggggtggggtggggttctggaagcgcggtcacggaaataaacttcaacaaaactcacccccagcagcttcagtctctgcggcaccctcgccgtcttgggcgtcgtccgagtcctcctccgcttcggcgggaacctgatctgccgtgcgggcggcctggacgttcactggtctctgatcagtcacacatgagagaagtaaacagaaaattcgaggatcttacggtctaactgatccaacttctccgtagtctgagctgccatcttgaatgtggcaattgaacaagtcgtatgttcaaaggcaagaggggaatgtcgggtgtcggggaaagagttttgctgataagataagaagaggcttggagatttccttggcggcggatggatgttgctgcctgacatgcctgttgtgttgtacacttcaacacgtctaccatcatgattcatacatctccatctcccgttcatattgccactattaaactatgtcgctacttaaacttcccgctgaacttctactaaaggtatcttcacatctagaatatgtttccgatctcgactccctctatcaatgtcatcctttcctgtatactttgttaaaagacagagtcgacgaacttctgaagacggagcagtctatccagcatctcgcatgggctgcagtgaatgggaaggaaacatgtgttcgcaagctgctagatgtaggtgcgttattcgatgattcgttcgctagtgatgctgcgcctggggatgctgcgcctggggatgctgcgcctggggatgatgagtctagatatgatgccgtaggtatgatgcacctaggaatcataagtccgcctgtcgcaagcagagggatgatcctatgacgatagctgcaaagtatggtcattttgatgttgtccagatgttcctcgatcgtagaagagacccgactccagagatcaacgagtacatctacgtcgaccttgatcaccttgttgtcttcggaaacccattgtccgtcgcagtgctagggggtcatacctcagttgtcagtctcttgattgaacgtggatttatcaaacgctgtgcagaaccccggcgaaaagcggttgtgcgacctatcattatgcttggctgttatgaagaggcatgttcccatcatcaaacttctgcttgcaggaggttgtgatcctaatgttgagtgctctaacaaggccctttgcatcatattgccctagctcctgctacaagcgcaactgtagaaatcgtccgtcttctaattgatgctggggctgaattctggacaagcatgaatggcgacgatccagtcttttctgccatggaaaccggcaatgggctgtttctcaattacaccttcccactaattgagactgacaccgaaatatttctgatgatgcttcatatgttcaccggaaaatacaagacatttacctcgtccctcctgaagaggattgatttagactacacaatcacctttggcgcgagagaacgatgtagtcttctgtgtgtcgctgtaggtggcggcttcccggatctgttggagagaatactattattgaggccttattattcaaaggaatggtcttgtcccaaaggccatggaagtcttatggctctcgctattgcatctggccatatcggaacgatagagttatttctcgaatatcgcgccaagcttaggacggccgtgacttatcccacactcatagtggaagacaatgacggacgctggaacttcgatgattgccctccttcaatgattcttgcgcttaaccgaggccatgatgatgtcgtgaagtacctcatcaataagggctttgatgtcgtatttccgtcgtcacgtcatgggaatggttttttcaacagagcactttatctgggcaaagcggaaatcctccagatgcttcttgggagttctagtccatcaatcgaagatattgcgttgtttggtgatggcctgtcgattcagctcgcagtcttggggggagaagccttcttcaaattactccttgagcatggagtacaactgcgaccgggtcacgttggacattgccgcgcattcgcatgtgctgctttgttagctaacgtgcctaccttgacgatgtttttggatgctggtttcagtctggataagcaggcttcagacaatgacgatgacacagtcggcctgttattggaactcgatgaaaatagaggtgtcacgctcctcgctctcgcggctcagacgaaagatcgcaatgccgcggaagctgcggttgattttttgctagaacggggagtgcagctcaaccagttaactggctcttgcaatcacacgcctttactccgcctagccttgggggtagctggaaataacgttagcactgtcaactctttcgtcgagaaaataaccaagaccaaggtggacgaatacgaggttaagcgactacaatactttgaggaaactagcgactacggattactggcaagacagcttctattggagaagggggccgatcctctatttttgaacagaagtggaaagtctgccttgaccgtgaccgcatggagaaatgatatcagagaggtcaagatgttgctgggatatgtcgatccaaacgttccgatcagtacgatcaattctcatatattgacagcgatggccctgtttgatgattctcgcgacactattcaagacgagaaaagaccctctttggccatgcaaaagactccctggaatatttattggcgcaaggtttacccttgtcctagcgaatagttgaatcgagtacaggtatgcagcatgtagcttggcggagatttcgttgtaaatggcagagaagagttatctgatggtatcaaataaatacgctgaatggctcagggcctaggacattccaaattagctaatgagtcaaaccaaggaagtaaatctgtgttctgatactatatacaattttttcatctcacatgtgacatggataactatagttcttgactaacaggtctcctttgcacccgagccatacgaagcttcaataattgacggtattcggatgacccaaaacacatatccgggtcaaatgtggctcctttgtcaaaaagcagcctcgccattgtatcctttcctttttcgagggctaattgtaccggtcgagagttgccttcaccactagggtcagcaccatggtctagtaagagcttaacagccctagggcggccatagcagacagccaaactcaaaggacagaaatggactgcccttcggtttggttgatggtctttatcaaggacggacgactctttcaataccttctctaaaagatcgtcaaggcggttcacaatcgccccctttaagagatagcaacgttgaagattaccgtacttcaatatgcgatccacatcaatccagcttagcagcaatgaccccatctcgtggttgtcccttggtcgagagaattcccacaagacttccaaccatcccaattgccgccaatgaaggttgttcgctaggaggagcttcatgacggggaggttgtctgatcccgcggcttcgagtaacagtttgtcatatatatacaaatctgcaccagcccctactaagagttgggcaatctccagatttgcgggtgaaggtcttgtagcagcagctaccgctagaggcgtcataccacgcaggtcataggtatcgaggctgcaataattatattcgaggaagagtctgacaattgatacatgtcccagttcgacggccttgcataaaggaattgcagcatgtctatcgtggctgttggttttgcaatcggccttgtgttcgaggagcagtttgactactgcagcatgctcgcttgtgactgcagccttgagtgtcctgttgaatagatctccttctttctcggtgtcatgttgaatgcagtagggtaggaacaattcaacaatattggtgtgtcccttccacgctgcaatccttattggttcttgtccttcgaagatgggaaggtcgtccaatatcttcgagccgcacatctgcaacagtttccgcgcactagcttccttgcctttttcggctgcccaggctatcgacttcccaggtgagtctttggcgatggctttgtaaagattcctgtttgacagagcatggaagtggcggctgacccgtgtgaatgcattgaggtcacggtagtcaaggtggagggatatctccagcagcatctcattagggagctctgaaagagtcgtcatgtttcgatatagtttgattgtattgggagaagatgtgtgtttcaaagaaaaaaaggaccaaatctgtctgtctcttttgactataataccaggtggtttctcagactgaatctatgtgatgggacatcgggggatttatacaggttctccagggacctgctttgaatcgtgttttacgttgaataaagccagtgtttcaagtcaacgccttgttcttcgtgtgtggtagctctttgatccggaaatccaatatagtctcaaagggtataacaatatcgctatacattgtgaaaggggggttggcgcttcattgtctatttatggatactagcgagtacaagggtatatgcagacacaaagcccctagctattccatatccttgtcaaagaaaagcttcaacttcattttcagttgtcttcatttggaaacgatatcaagagtcggttgaaaggcgagattattttaagcgctcaattaaaattcttccgtaatcggattttcaagcccgggagagtgggtgattgcccataatcatgctcaaatagaagccttaatgcaggaactgtttcgtggctgagacgcttgacatgttctgggtctttcatccagtgccgtaagcgccgttggaattttagtgcgaatatgaaacataaggagaagcaatacgcgatgcgccgattatcattgaaggggcccaggcacgggcacgataggattggtccatatatttattacgacttcctaagcgcttgatgtatagttcccatattgtcgggaccatagcaccaataagccctagtctcatttatatcagtcccactttcatactgcttatacaccctattcctaaggcagcgactatcctaagaggagccctacttcatcagctgcaatgagataccaccgaagcgaagctcacagagagcatctgcaacccctataacgaaagaaactacaatctcacaatatgtgctccgtagatccttaggtatccatcccaaaccggccaaggagtgttctcattggatcaaaccgttttgatgcccgaaatggcataacctatctcttatctaatctgatcatcaggagctaactatggggattgcaactgcccacgtgagtgtaggttatattgactgtgttgttcccagagatgaaagagaccaaatagaatacatatgtagaattccccagtagccagtaataaatatgtggtaattttgtacagtcgatcaacttcaaaccgctgtgacgccactgagatcttcacctccagtcttcttccgcttctccctctctccctcttccacccctcccccaacctaccgcggctcttatttctctattgatttcgatgtaacacccccttaatacacgacaatgcctccatctcgagtaacatcaattcttctctttccgcgcgcgaccctctctccctccccttcaacataccggagcatctcaacccaacccctccgaccgcaattacacccacgccaacaacaacaacaattcataaaaccaaccatatcctcattctcaaccagcaatccaacccgggcgcgcgaacaaaacttctacgaaatcctcgacattcccacaaccgcatcatcagcggagatcaagaagtacaccacccacacccacaccagccctcctccacccctcaatctccaaccccatatatctctttaaatacttacctacccaaccgccagacaattctacgccctctcaatgcgccaccacccagaccgcaaccgcacagacccagacgcaagccaacgcttcgcccgcatatccgccgcctacaacgtcctcggcaacgactcaaagcgcgcagtctacgaccgcgaccacggcttccacagcgcgcaccacgcctccccaggccaaagccacagccaccaacaccctatgggcagccacagcagctacgccggctcacggcccgccagcgggctgagcaaacggcgctcggcgttccacggtccgccgcctagtttctacgagcagggtgggtatggtgctacggggaggcaggcgcagggtcgggcgtcttctggtggtgcttcggaattcggggctggcgctggcgctggtgctgggacgaaacaggctgatccggaggattgggaggggtttattcaccggaatccgttgcatcatttcaatgctcagagtcatttccggacacaggcggcggaggataggagaaggagcaataggaggcagggagctaggaggattgatgaggatgaggttgatcctagggttgatcagacggtttcgaggttctttctttgttccgggtgtctaattgttatgctcgttgtagtggacttttggcgctctgttcctagtgctgttgatgggaggaagacgaggaagcagaagggggctttgtcttcttgacggagttgttttttcactcatacttggatacatgtagtttcttggtatatatagtcaagtgcattgctggttgatgtactcctactttggcatatctacgggcacacctcgtagtgctttatcctatacaaatcaatcgaattgatcaaagaaacagttgatttgatatacaaaaaaagtgatcgagcagaaaatctacgacacacatcgttactatcttggacgaactccaccataatcatcgttctggtgaatcagcaagacaagtgaactaataactgaagtttacaataatcttcccaaaagatggtaggccatctgtcaggtttctcggaggcttaggctctagaagcttaagactcgaaggtgaagctggcgccgaccttgtgggcagcctggttcaggttctgggtatcgaaggaagcaccgaggccgagggtgacaccagggcggagcaggacgttgtaagccagagcggcaataccacggtcgttgatcttggcctaaattgcgagaaaattgcgcgattagtcgtgatctacatagttatataagcagtttaaccgcgtgaaacgaaccttagcgaaggaagaggggtccaggcggtacttgctggcgacctcgaggccgacggcgttgccggatgtggagtcccaagaagccttggcaccggcctcaacctgagcgttgacgcggtggtagtagctggcggagaaaagggacaggttgttgctggcagtgatggcagcggagtactgggcaacactgtagccgacggcagcggagtacttggtgatggcggccttgttgacgtcgtaaccaccctcagcaccgacgaggaagccctcgtggccgagaacggcgtcgaagttggcggaggggccgttcagcagatcgaagaaggcacgggcgttcaggttgggctgcttgaagtacaggttgagcttagcacccttggactgcttagcgggctggtactgggtaaggatctcagccttgaggcccttggcgatgttgttgtcgagctcgagcttggtgtcgagagcgttggcggtggtccaagcctgggtgagggtgaggcctggtcggagtgagcatattagcctaatcctgtgtatcttggcatcggaaaaaataaataagttcacccggcgcgctattggaataccgcatcccaacatcaatgacataagacgggccttgtgcgcgccgggatctggaggtttcttctggagggggcgtttaccagtgggcgcatcaacgtatttggcctcgagctataggcgcactagttagtaatttgcatgactggattcagaaatagctttgcaactaacctgaccagcaatggggccctcgtgagcagactttcccttaacggtgaaggtgacaccgttgggagccttggacttgacctcaaggttggctaaaagctttgattagctatttaatcttcaatgagtggcgcaatgccatgcagaaacgtaccggcagcgccgtggtagaagtccttgttcaagagctattgggattaggtattagccaaggttccgagttttgtccccaacagttgtgcgtacatcgttggtcgccttggcgatatcggagaaagcagctggggcagacatcttgacgagaaaaatctaattgaagatggaggaggaagagctggttctaggaagagatgagaagagaggaagggaaggaagagatgtgatgatgttgggggaacctaggggcttagcacgggttagtgggaggtcggtgattggcggttgcccggctgccgggaaagcccgccgggaatgtttgggcagggtatgtcacgtgtttatgggagacattcaaaagacattggaatcataacattataccgactatacaccaaaagggtacacatatacaatctaatccggtgctatatcccccaaagaaaatgctagatcagaagggaaagttcggatccttttgtttacatgctctcagacttttactccaccgacttctcatacttctggttgtggatggcgatggctctgcaaaggatggttagagaaaataatcaagaacaggggaaataatagctcaccttccactgggatcgctctgcttggaccaggtaggggtccatcgctcgacagtaccggcacagtagggagggaagtgctcatcgaacatggtacggtaccagtatctatagctaggttagttttcaatggtactataatatgaaaaaaagaagtgggaaacatacgcctccttggtgtcgggaacatcagtaccccattcggccttagggttcttcatcatctcgtcggtgacctggcgctcggcctcatccttcaggccatcaatccagctgtagccaacgccatcactgaactgctccttctggcgccagaggatgttgtcgggcaagtagggagggtttccaggctcatcggtggtgtcaaaggccttgcgcagcatgtgcttctcgatacgctcgggggtgatcatcttgtccttggggtcaacacccatggcggtctcaaggaattccttgtcgaggaaaggaacacgggcctcaagaccccatgcggaggtggacttgttggcacggaggcagtcagccaagtgcaagttcttgatacggcggacagtctccttgtggagctcctccttgttaggagcagcgtggaagtaaaggtagccaccgaagatctcgtcggaaccctcaccactcagaaccatcttgacacccatggccttgatcttacgggagagcaggtacatgggagtagaggcacgaatggtggtcacatcgtaggtctcgaggtggtagatcacgtcagagagggcatcgaggccgtcctgaacagtgaaggtgaaggggtggtgcttggtgccgaggaacttggcaacctcaagggcagccgcggtatcgggggcaccgggaagaccgatggagaatgagtgcaactgctggaaagtggtgacggtggacagctcgttttcttcgttgattccaaccaactcagcgtccgcgttggtgttctggggaatgttgcgggcagcttcggccaagcgaagggtctcgcgctgggcgatagatgcgaccaagctggagtccaagccaccagacaacaaaacaccgtagggcacctcggccatcagacgcttgcggacggccttctcgaggctgtggcggatcaccttatagtcaaccggggtcgtggggacgttggcagggtcccaccacttgggctcgaagtagcgggtcatggtgtcggtgctcgaatcatagatgtggccgggggggaaagcaatgatctcgtcgcagacggggtgcaagcacttgagctcggaggcaaagtagacggcgccgggagtcgatgaggaccggccaaggtagaagctggtgacaccaatgggatcacgggcagcaacaacacggtccttcttcttgtcccagagaacgaaagagaacatgccatcaaggtgcttggggcaatcgaggccgtactcctcatactactatatatcagcattccgaatcttaattccgattcacttatgattggcctgacataccaaggggaggataacttcacaatcggagtgtgtcttaaagttgtacttgtggcgaaggtgcttgcgaatgaggcggtggttgtagatctcaccgttgaccgcgagggcgagggtgctgtcatcgttgacaaggggctgggcaccggagtctaagaagattttgttaacacatcgatcttcaaattccatccttcatagggaccacataccaacaccgacgatactcagacgctcgtgcgccaggactgaaccacgatattagcataccacgccgaaaccgaagtcattgcgtgttaactcactagtgctctgagcgcagaagtttccacctgtagaaaaaccttcgttaaccccatgatcctcccatataccgcgcaatattgcgactcgggttgtgactcactccaatcgggaccacgatggcgcacactatgatcaggacacgagtcagcattttgttgccaattgcaaattgcagcaattgaaagagatactcacgccttggccatgcgcaaagctgtaggcttgaacttttgcacatcgggatgactataggagtatggttagtattccgcaaattgaacatcccactagaggccgggagttagggtaggacatgacgcactggtggcacgcgaaaattccacacatgatgggcaattgggaaccggggtagagatgaagatcaattcaggaggacagagagaagaagaagaagggtacgggctgaaattgactaatcgtgcgattatatggggaacctctgagcggcgatttttttcaaattgggtgcccgccctcccggcggggcgatgtcggcaagtcttttgagtcaccgataagatagcctgtgggcatcctgggccaattccaagtttacaccaattagcatgtcgggttaagagattttagctgcggtggcaagatctgtcactataggcgggttctttttgccgcgtcatatgactattggagtatagatccttggagaatcatcgattcaagatcacgtgactgatatataccccaccatgaactatctagccctagccaagcccctccttgtccgtttcaggaaactgaaatatatgctgatcatgagcttgtttcgttctacaagcatgtctatggattgcttctagaagcacactttggttggagtttattctcatttagcgaaagcttcttgtgttgttcccctaccatcagcatgtgatctttaacattctttgtactatagagacagctgggaaagccaattccaaggagaaagcgagagtcacaaagacaagatcacattcgtctcgatattgaggccatcaagatctaccgagacaatatctcttctggcttctcattttgggcctcaagagcaggtgtgatggtatcatcttgatcttctcactcaatgctaaaatggtgagtttcaagagacatacacagcccggtgcctatttaatgtgatgtctcgatgtctccatgacggtaccttggacttgcgctagctgtattggcaaatatgacgcagtgttcagtacacaatcctataatgttgaaattccaattgaagaaaggcttcatcaagtaaatacattggtgtcttgttaattgaaagtggaagttaaatgcagctttccaagacacccatcatggactcatgttgcatcagtgcagagaggtccggatattgtgctggctgctcaggtgattttacctcacaggagcagataggtacaacatcaagtcgcctctgcgagggtcatcctgaactcaatacatggcaagcgtaggtatcctggtagggccatgtatgtggtatcattgtttcggaatgaccctaagcccagaaaacgccatccattgggatatgtagaacgccatgctcgcgatagaaaagcaaaagttgctcccttcctttgaaaataaatgcataatcttcccacaatctccgcagtatcccatgctgaaaaaaaaaaaagtaaatgacccatggagcgccatcgctgtttacgcttgggtaactcagagcttgattgggctggtttcctaattgggctggttttccttgacagccatgcgaaccctgcgttcgtattgaggacggtccttcttgaagaggttgtaggcctcggcctgtgcaggtgactcagggttcgggtcgtccaggagatcttggataccgagcaagagctgcttaatagtgatggcaggtcgccagccctcctcctcattcagaattgacaggcaaaccgttccggaagggtagacattagggtggaaaagtgctggtgtgaatttgcctgaacagtcgtagtattagtatgagattatcatgagaaatcagaaaagatcatagtcgtagctcccattccggtatatcgcaaaaaggatacgtacatttgggaggcttggtagggtattctagaagcatggaaagaatgtagattagtatgaggatcttcagtagtgaatgtattgcgccactcaccatcagggaaaatcaagtcaatcttgaaaagtccaccttcccagagagtgttagccttccctggaatagcacattcccagttcttcagatccaggccaccctgcggggcacgtttaggctttgcgacaaagccaaatgggtgatcgcgacgccattgctttctagcgattccatgaatgttagtgcggggaagggcgtggcgcaaaagatgcgctgaatcgcgggatctgcgggataagatatatgcttaccgctcttcctggagacggttctggcacaacgacatctcggggagtgttcagcggatgagtagctgaaacgggttgactggcggaggatggaagaatcaagcagcagaaggatgcaacttggccgaaaatagggtgtaggtcccgatggctggctgactggtgggtaataagagagggagaaagaggtaaggggacgagtgggagattttaaaggtggcaatcgtcaaagcttgggaggtgatagcaattgacctccccacgcgaacaatgagtttgcttatgtaatgcatgcaggccttgtccaggaaccaaccagggagcctcacttctattgttaggtgtagatagcaattacaactggttctgcagtattttctttttgttgtcttctatgtggttataaaattaccacatttgtccagcggtcttaatctaatatcatttgttctacttctccgatagaagtactgctatgtatatgtaggactaaacacttgcactttcagcgtcagtttgctatgacctaatgttgaaaatgtgagctcaatcgatcagaatactgaaagttcaagagtctccaattacagctcctgttctgtgccatgagctgcacagagcccttaaagatggtacctaggtcttgactacaatgaggattcgtgatgctagacggtgctacatttatacctctccttaatattggtacaggttattgatcgtctcataaattttatcatttgatgtatgtaactgcgtacatagagaatgatatgtagaaagtatgcggcgaagttacacgatttgaggggggaaacaagcgtgcttcgcgtgccaacaaagaggagggcgagaaacagacaggagaatcattatctggtctaaagttttacaaattgcagtaacaaataaagtgaggctttgctagtccgtgggcaaatatcaattctttcttgctaagcagcttagtggttacgtacctagccctaagtagcagggaaattataggcggaaaatatgactatagaaatacgtagtagctatgcatagttcggggagtgtggatctcgaatatactaatcctatttatggcatatatctacgtttatactgtattaatatcggtccaaggtatagcaatttagttggtgatatccagcaagatgttcatatagagcagcaagctagttatggacttccgaccaaccctacctgatagaattaagttcctgctattccaacctccataaatatgtcgtatttcaagagtcattatccttcgcctacaaagttatggacaaaggcctccagggtaacaaagagccaaaaatgctctagacataatgccttccacccagaacaatagctattaaaaaccaacgactcagcgagcaaatgtttctttattcgaaccccggccggattgatcctcgacaaaggctctttccaacaacaagtttgccggcagatgccaacatactttggaatctgggttgaggcgtataaaggaggacctgctcatttcatctatcatactcctccgaaccacaatcaggagcccttagtgaaactcctatgagcaatatttacatgaaacatcccaaagttacttactattgtttaccataatgtgtcattccatcgtctggtactatgccctatgccagcaccaagacccggcagcaactcgcctgatcatgtgccgcagagccttcatagtaggctacgagtgtgccgaagcgcaaaacacattctttttctcgattatagggaattgtgcacaatgcaggcttaaccagctgctgctacgccactctgtctttcgcgactggcggagagaagatgttctgtctgcgctcaacggtgcattccaatacagcgacgaagacggctggaatatcgatgacagcgatgccgacgaattagatatggaaacttggattccccagtctcccagcttgactactaggactttcgctgagcgagctgagaaccgggagaccaacgtatcattccacgagggtcccgtacgcacgccgaccatagtgtaccagtcctcgcctcacttgtcttgtgtcgctttggttgaatatgctgatgactacgcagatgatgaagatgttgaagatgagcctttgcaggagcctcagccccagacgagccggcgctggcgctctttgattcctcgtcctactaggttggtgcgcaacgagcagaatgttacatatatggcgttcagcactgatgacgatatgttggacacagagcctttcctcggcactcctaaaccgaagaagtatcatcggacttggcgttcctggattccccttcctgttaagaagttgtcggagcaatagattgatggaatagagtagtaggatggaaatctttgatgtttcataggagattagatgattgaattttgagatgattcatagtctgcattttgttttacttttagagtaatcctaaagtaatcctagggaacatcgcaatgagacttcactagagcaacatcaaatgaaattgagcactatcattaacatagctaattaataatatgaaagggtataaacataagccattggccatgtaaaaccccggtcatactcctcggtccgagaggccttgctatgattttgttgccgtgcaatagtcgagaatgcacaaattaacatataatcgagatgtcatgtcgtataagagaggacgaacatgggcagttagactgtgtaaatcccttggttgaacttgtcgagatcaaaaaatcgtgccgtgatttcgttgccattgaagatccggccttcgagcgcgttcacggcctaacggatatgcaatagtcagcaatgcacaactcacatttgaatcaagacgtagatatcaaaagcttacccgtagaccagacaagggatgagtaaatttgatcaagaccgggactggggttccgacgtcgcgagggatgacgactcgctccacgtccccatactatgagtcccggaagttagtaaaagcacccaagccaatcgaaaaaggaaacgtaccttctctttgcattcatctccaatctcctgtaccaagccaccattatggcttccctctatctccgcatccaggtccataccgttcaacatgccccgtaggatgaccacctcactcatagggccaaacttgctggtttcatattcgcccttcttgttgcttccaatgatcttacctcgcccggcaggtgtgacaaagccaccaccctctgagtctggtcgcttctttcgcttctcaagcttgacttgcagcggcttcaccataccagaaccagtagcgccgaggccggaacccttggtccagccatacttggaaagcagtcgttctgcgaaaccttgttgcccgggacgaagagaccgtggagcggactcgtctggttcttcctcgtctgccggttgatcttgggccaatgcggcttcaagttcggcttcggaggctgggatttcttctgggggtggcggaagattgtatcggactggtgcgcgggatatggttgcagagcttggctggaaggcgtcaagggggcgtggtggtggaggtgggatggtttgtcccgatggagggtcatcggaaattggaataggatcttcagctcggcttggagatgaaggcggaatttgtgcgtgagtagcgattgaatcattgtcgaggcgttgccctaatgctgcacggcgagcaaaggcatcgtccccagatgtgtcattggggatagaagctggtggtggcacgtcattgaggtttggcggcggcgcaaagttgcttggaggcgcaaattgttctggtgatatcttattagcctaaatatcgtcactcatcgcaaaagaccctaacatacgcttttttggctggtcataatcatcgctatcggaatacctgctcggtgagcgcttcctagcaagcgcatacaaggtatccttccactcgcggacttcaaagatcttctcgtcactatggccgtattccgcgcaatttgtaggccgagaagagtcgtagatatcttcccagttttggacaacatgtgtttcaaagttcttcttgcgcttctttcttccaccacgctgtcgcttctcacgggcgtactcatactcgtcatcttcaatggccgtccaatcagccaaagtgctctttgtcggtatcgaagggttagctgagggctgtggttgaggtgccttgggtaaagtatgtttcgattttggcttctgggctgagagctgtggtcttttggggggttggaatcgaagggaggctataaaaaaacatcgcacgtcagcatataccgcgtcgatattcaataagtcgagggtaaataccaggattcagttgttgctttttgacgctcgcgtcatcaggttgaggttctgtctccgcctgcttaaagacaacaggggcacgggagatggtgccaggtgtatcgccagacggatttagtaggttggcatacagggacatgccccctctcggaggagtaggatcagaagccatcactgttatgctatggtgagaaagtggttgtcttgaacgtcggcatcgcgataaggcttcttttatctggcgccgcaactctccgactctccgcctccccaccacctataattgtcacctttaccatcacctgtgccatccttagctattcctcgtctagttggtttctacttggatttccgcaactttgctcaattttccattgttaaaataaaatctgcgcctctatttaaacaagttcggccggcaaaggtcgatagctcaagcccaagcctaagccaaaaccaaacccggacgtggacacgatgaccgaaccaaacaaagcattagggaagccaaaaggggtatgtacgaatgcattgcacagaccaatataaacactatcaggccacttgatttcttagccaaatcctccaatccttcctccgctcttatatcaaatgagtcctttaatactgatatcgatctagtctctcaatgctcctattgcagctttcactatggctatcctccttttgacatactgtagtagctctatccgctctgcacggcgagatgcccaaacccatgttcccggtcctcatcagccacctccacgaaaagacgagtcctgggttgaacaagcacttgaggagagtcgagcgcagaatggtgggaagggacgatcctgaggtttacctacatacatatgtatgttgaagggtgcttttctacatgtattatatggattgaatccactgaacaggtgtttgataaatagattgtgataccaacatgtaaaattctttgttcattcgctcttgttgctatataggtgaaaagagagcagaaccaactggaagtaacatctgcatcttcatattcaatcagaattttcagtgtatgaatgatcatgccccgggagtctaagtgtattgacaacccagttcaatcttgaaattgttcatcatgcgaatagtgaaggaatgtgtgatatgaccaaaggatttgcaaaattgggtgatatgagaatatacaggcacatatagctgcttttcaattgatcaaatagtcgcaaggtcagtggagttattgatttatgtaaatcaggttagtaagtgaagctgattgaaatcgacacctggttgatctaaaattgttttctgaccactgttaattgattccaaagtgccagcattgaacacttgagtatcaagtacagattgatggtttgtcgaagtgaaaaatgtggagggagaagtggaaggaaaagagggaaaaaaaataattgcggcaaatttaaataatgtgtcacgtgcctgtcccataatctacttagcctaggatgcatctatacaacgtttatcatcaacaagctgtgtggcaggttttccacacactgtactttccaatgtaacaattgttaggcttcgcttgggatgagagttgatagtaatctgccattcttgaaaattcgcgctactttgaactcatcaaacttgtcacaaactccgaatacaacgcaagtactccgtacaaacaaggcggaatccaaagagatgggtctggaggacagttaacattcatgccagaggctttgcaatggtcgagatgaagtctgagctaattttctaacagatagcttcaattgaaatatgctattcgtctttcagaatcaggcttgggggccgtttctttatttgaggacatatattcacaagaatgggcaaccatgtagaataggtatgtatgtacagaaaatacatgcagaagccaggaagataatagacaagtcaaaaaggagcaagaaaagaaaagccatgcttggaggtacaataatgttccagctaaaatgcagcgagcatatgaagacatgtgaaagctgtttcacatgtcagagccctagaagtctggagacactgtcatctatgccgaaacgctcggatgctttcagaatgcagtagcaaattttactcgctaaagattgatctcaaatatcgagtaacagaccgcctcgtccatgtctatacaggttgtgacaaagggaaaaagaaggactcggcgatcagaagcggtggggtgcgatgtgataaaagcggatatgaaggaagaggatgaagcgtcgaggttgaaggttgaaggttggggtggagcgtgagggtggagcgtggagggtagaggttaaaggttggaggttggaggttagggttggggttggggttgaaggttggagatagtcttttgtgtgatgatattgtgtcaaatagatcgcgcagcttcttcttccgcctggagcctcagagcaccggcatgctgcaaatcaccgatctgccgccgcaggtattcgtaggtgagcatggtggtcatagcagccggaacggcccggaataggttgacgccgatccctgagtaaaacgcatgccatccctcctccttgaggattgtttggaacgtgcgtataacgccattgtaccgtgggcggctgggcattccatctgacgaggatatgccacccgaccggccgcggtcatgtggatgtttcaatccgccgcggaatgcgatctcttcgtgggattgcgccggaacaccccgttgctgtgtttggagtcgtgtccgcaaaacctcgtgcgggtacgtgattgtgctggcacagatcttgctgaggaaagtggcagcggatattccagcccagtgtgagctcccatcctcctggtgttcaccgataccagagcccgtgaacgtcatttttagatattcgtaaagtgggaattgaatggccacatgtgtcagtcccagcagagccggggtgaggccagaatagaaggagcgaaggccctcaatttgatacatctttcgagcagcatcccatgtgcctttgtattgccaaggggctcgcactccttcgctgttttgtttaatgctttgtgacatgagcctagttttgatgacccaaatagggttcgtcacaaccgttgaacatgcaccggccgtgaccgaagcatagccgcgggataaccaccagtttcctgtggttttgtcagtactgctgaatgaccgaatccttcattctggagtacttacctgtcttgtcatagaagtattcacgagcacggtcatagactgctagataaacagcccacgtggggagatatcccagcaacattggacctagtccctggtagagaccgcgaatgccatcttctcgccaaatcttccttccgcttccaagcaagccacgatatagcatccccgaggcaacttgctttgctccccgccgaaacccgccctgggcttgaagcttcgttttgataacatcaagagggcatgtgacaatcccagaagccatgccagcactggctccgcagagaggtgctacgtaaaagttgggtatcttggtggaaaagagctcgaggcggattttgaaatcggagatcggcgcgggcaagttggggacattgtcgacatgggttgaccgagcttgggattgggagctgtctggagcgcctcggccgtttgtattcatcttggcggctggcgctcacgcagcttttcgaccgtactgaatcaatgaggcttcccggacacgagcatagttatcgagtggctcaatccggaacccgagaatactatttcgaacggagctgggaaagagatgtagatttatccggaggtccaaggtccaaagtccaaagtccttcgcgggtgtaaggaaggaggtatgagtaatgacggagaattgagagagggttttggggggccgatgttgccgaacccggtgtgcttccttttgaatgcgcaatgttctattatcagcacggatgtgggcggggttctcggaatgatcaagcttcttaacgtaagcagggatcagtggattctttgctgattgacaaatcccatctctctcaaatcaaatgacaagatcgcaaaggggatatgacatagcaaaccgatctgttagatagagtgtgccgattgaacaatcccagattctcgccgcctaaggcgcatatagatcacgtgctaatagcctcaggtgtagaactgccgtttcaggactagccgcccgagctccgttttgcacaacctcgcaacatcgggtcatctcgtgttcccgatagcctttctaacctttcaccacacccacgtcaattgggatacccgggattcaaaatgtctgccccttcgctcgccagttacatcgtcaagcgcccatggctcaagagctggctcacccctctctcccactggtacaccgatgccgccggctacaggagactcggactcaagtaattcttgccctctcacatcgacaaccccccaccacgagcgattgagacagggattgggaattgtcaggtcaaattcgtcatacgtcggtggcatatcttttgaatgcaatcggagtcgtgtcgaattcgcccggagccccggtcttgcggatatcgttcgcggcagggttggaccgaaacacttgctaaccgcccaactaggttcgatgacctgatccccgaggagagcgagaacgtccagaaggccatcaagcgtcttcccgccaaggaggcctatgaccgtgtcttccgcatccgccgcgccttccaggttcgcccgatcccttctgtacccgactggcgcaaaggctaacaaatgtgtcaattgcagtgctccatctcccacactcttcttcccgccaacgagcagatcaagcccgaggaggtgagtccccgacatccaaatttcgccctccccgcattagtctccatatcggccaatcctgttgcacggatttgtcacatccaatccgactccgtttcggggtatacactctcaccacaacgaatacaatgctaacgatgcaaatcaaataggacgtcgagtaccttagccctatcatccgcgagatcgagaaggaggttaaggagcgtgctgaccttgacaaccttgttgtccgcaagtaagccgttgctacttggttcaatagaatatgaaaacaaggggttggggtagcattgttcttggcatggaataaacgcctggtgtgctttcttcgtaatggaatgggcgttgtcgtcggcggcccatggcttggttacgcagcctgagtgtactgatactgtacaaatcgattttcttcgcgcgcttatattcatggtccatcttgtatcgacaagcgggtcttgcacctcttggacatcactctgtagtaatgactggataagctatgcgggttgtggtagctggtctgtttgggttcgcccaataactatgcctacacagtaaaccatctttcaccttttcttatggctgtgaactcaaagccacaattcatttcaaatattaaatatatacactataaaaacttaaactacaacctcatctcgggtggtcgacgtctaaatcacacggtatcaagacaagccggattcacggatgtagtatctcttctacctcttttaaccgccaagaacagcaacatcaacgttctcaatccgccacatataccacatgaacagactcctagagcaactaggttagcacattgtctgctagttaacagtataaacaggatcaagcgtacctatatggtgcaaacttggcagcaagttcaagcatatccttttcagccatatatttgaacttaccaccacctttgcccttaagtttgctcacatcacgacccataaaggcagcgcagcctcgcctatcatagtgtcaataaacgcttccactaacccacagcacaaacatcacccagctataagaccaatagaatgaaatcaagaaatgaacttactgtactcccaaatccccagtagaaaacacatcaatgcgcttaagcgcaaacatagcaaacatctcaaccgaccacttccccaacccccgaacagcaataagcttttcaaaaagctcctcatcagtagcccgcgccaacatcctcgccccaagctccccactagcaaacttctccgcaagaccctggatatactccgccttgcgctgcgacagccccgccgtgcgcagggtagcgatatcacacttggcaacctgatccggagtcgggaatttggcatgtctatgcccatcaggcgcaacagtatcgggcaaatcaaacagtgacaggaacttgttccggatagactttgctgccgcgccagagacttgctggccgatgatgctgctggtcaggctgttaaaggggtcgatttcctctgccaggccggccggcgagaagagcggacatggatgctgctcgatcactactgcgatgcgcgggtctgttgctatgaggtgcgcggtggctttctcgagcagtgtccctgttgtggctgttggccgtggaagtccggtttttgagggggaggcatcttccgcgtgcgctgggtaggcgtttactgttgagccgtggggggttatgaggattgcgtttgttcggtgcgggtcgacgggacggtcgaggggagggggggtctggggtctgaatatcgtggggttagtgggtgagagttggttgtctgtttcttgtttctctgcgactgcaggctccggggaccaataggaggtccctgtttttggttttggttttgtatttgtaggtttcttgtctgatttgttggtctttgtgggtgccttgcgaggctttgtcactgcgctgtgttggactcttgcttcgctcggagctgagctttggagtagcggtgacttgatggttgggacggaagcaagtcgggctgagcgtctgagtgacattcttgaataatatcagatattcaatgacctatatatggggtactggacctgaggaggtctgaggagtcgtcgtagcggaagctggggtttgctgacgtgcggagttggagatccgccgcgctaccccacgaatgtcaaccacactgacactcttcaatgggagctggacagacagacatcgaagcttaataatattcatcattgaccgttgattttcgatatggtaatcgctcttattttcgtgcatgcttaccacttctcatgtatgacgtatttccaacatatgcaagctatagtcatctatatatctgagacctttagacaccgttatgggatcccatttgactgaaagcctacgtgcaggagtcgtggatatttctagtagtttcaacaagcacctgtggagctcaggaatttgtttcttacgccaaatctatgaagaggagtagggttgcctgccaagagttatatccatgggttatattgaaacttacacgagtaactaactaggatcttatgaatcgcacattactcctcttgtcatctctctctaatcaatatcatcgtcatggattatctgcaacatacatcaactcccttcgttgtatagatgtggtatgcgatccactgatggttctatgggttgttttattgcaaacagtgctatgattccaatgttacatcgacgaaagttcgataaaagcctcaatgcacatagatgtagcatccaaggctatttgccccaatgatatctatggtatgtgccgatgatgaaagatgtacggaatagacagttgctataaatatccctataatcttgggagacgtatacggccagtgattgtaccttggatttatactgagaactcacgcgattggatgcgatatactccgctacagcattgtcccaaggaactatccgcaagaacaccccgtggcccgaaattgaagaaccatggtagcttggtaatatattacgagatttacatgaaatttgaaagacttaaagatcgaggatgggtataattcgtgatatattagcgagattttggattgaactattgttcaaaagatcggggctcgcgtcggtggcttgcgattatatattaacccaatcgccgacgaattttatcggaggggttaaaatagaaaaataaatgaaagaacagaaatagtccaaacgaaccgaccgttcatctattgcaattaatagatatcgaccaataaaaaccgagattatcatttaggccgaagcgttgagccgagtcaactccaagacgttggtgcattagttcgaaatcagaaacaagaatgaatccctgctcgtgcgactaccactagaagccatcagactatgataactagaaggtctcgccttacagccccagccttcaccaggataatgcacataacccagagtggtcgggcgagtacattgtgcgtgtactccgtacttttggatcattgtccgtgttctagggaatgtggccattcgcaacccctagataggtcattgctgagcgttccacgcattcccatgcgtggccctctcaaccttttagggcagacgggaatgtgtgttgaatgctaggcagaaatcaccatacacttgtttctttgtctttcgtactccgtacctactgtgacaagtgccaagtttagggccagtacagctggactcagctttggggtatccatatttgtggcgtaacgagcacgggcaagtattgaagtcagtatgtgtcgaatttttccgaatcaatagacttgggtttcgcgacaaggccacgcggccattcttcatagtcgaagacgtacggaggaggatatagcaaatcattgaagtctttcgataggattggacgcgatagaaaaaaacatatcacgtagtggagcagtacaagagtggggtgcgacgtatcgagtgagttggcttcttctgaaacatttcccgactttacatcgccaataaccactttgccacccgaaaggggaacgacatttaagtcagttgtatccggagtacgaagtaaatattccattgtcaatactgtcaattccattgggtcttctagaacgaggtgcgatggattcgctatcgaagatgtaccgggccgatgaagctctagacaatgcttgacaggagctccatcgccggggccaaagttatagccggttctgcattgttaccgaaaacgcacagatgttgaaattttcaatgtacaacgtacgaaaatttccaaatgagtccttgagatcgtctggaggtgcgtccttgtgatttaaagctgtacatgtacatgtacaccgtacaccgtacaacaaggcaaggcaggtacctatactccgtacttggcgaggttatgtacctaattgggtacgaatggaaagtgtggcgaagcttcaaatcagtcgtgatcgactaccgatctccgagaattagattacctcttataccaactgatgtgcgcatggcgcataaattaggggtctgagagggactgcatggcttgatgcttggcataggcttttccgagcaccatttgcatatcacattcacgaggggggcgatgtttcgcctcaggtagagttggattttcggaaaacagccaggattgacagtaatccagggcgagtcattccaacgtgccaatcaaaagtcgcgcatgccgcaatcgacgatagcggcagggggcgggtccatagaaggcccgcaaatttagatcggccactatcaaagtgagaagcttcgaaaccagtttgaagattgcgtggctagtgtttcggggagaatcggtgtgtgtgtgcactgtgcagtggtggaggggttggcagttggtatgttgtaggtacggagagtctatagacctatgcattgtataagaatagttataggggctgagattgtctcatatagatgcaataagattgaacgagaaatgaagttacagtctaagacaatttaagatcaacaggggagtgagctgtgtcggattactagatgacgacaggttgataaattggctagttaacttcttggtcaagttcgttaagacgttcgtcacgagctagtatcatgcattattattagatccttctagtattaaggacgccggggcgacggtataaatttacatggtccatgtccaagataccgaggatatgacaacgtacttttgatatccgcaaacaaagctacaagacaccaaattctacggtagtacggagtatggagtacagagtacagaatcgccagtggcaactatcagatcacccaagttataggctaccttgccgagtgcatagcccgaattgaaagtgacgaaaacatctccaatatcatgcaaacatgaatatctacatgtgaactccaatattccccagtctatgaatcatcatgtaaacaaaatactcttccaaaggtttaccaaaatggagaaaggggggcgacttagcgttgaaaagcagggaattggtctggagttatttaagaattgagtttttgatttgattggtaatttgcagtcctgggtaattttcagctctggtaatttgtggtaatcctggtaatttgcgtaaccgtccaccactcaagtcacgagaaacccgataaattacctggcactgccctgacatgccggatgcggtactgtgtgtgtttcttcccccttggtatagtggcacctggtaagattagaatacaaacaatctccaccctcccctttcctctcgccccaaggctccttcttcttcctcattttactctcctccaaccttcgtccattcgttcttaccattatttgaagttcctgcctcgtaccactcggcagtatatctccgcttccctctcgtttgaagcgcttcttctctaatcactcattgcgaattttcctgctcaacccattcccatatctctaatcggtaccgacaccaataaccccctgatcgaaaaaatcacactgacacctcctttagaatcttgtgatgtctctcaagtacatcctccccgcgctggccgccagtcgggcagttttcgctgccagtgagtattctgttcccggcataatgatacacccactaatcatgtcctcttacagcttcctgcggtgataccaaggtcagcacccagagcgacgctgatgcggtcaacacttgcaccaccatcaagggtgatatcaccatcgacaagtcctacagcggcgaccttacgctcagcggtatcgagaagattactggtggtctgatctgctccggtggccagaacgtcagctctatcagcgccagctctctcacatcgatcggcaaagccttcgacttggagggactcaccaccctgaccctgcttgacttcgctgagctcgactctgttggctccatcaactgggaggctctccctaagctccagtccctgtctttcgccaagggtgtcacccaggccggcgatgtcagcatcgccaacactggtctcactgatctgaccggtattaccctcaagactgtcggtaccttcagcatccagaacaaccgtgatctgaagaccatcaacatcaacaacctcatgaacgccaccgacttgatcagcttctcgggtaactacgataccctcgaggtcgatcttcccaacctcggcaccggtaccaacatgaccttccagaacatctcctcggtctccctgccttcccttgagaagcttaccggtcagctcggcttctggggtaccaagttcgagactttctccgctcccaaccttacccagaccggtgacttgatcttcaaggacaacaccaagctgtccaacatcagcatgcccgttctgaagactgttgacggtggattcaccattgcccgtgatgacaagctctccaccatcagcctgcccatgctccagcgtgttaacggtgccattgacttcagcggtaccttcaacaagtgagtatccttcccatagctctatctgtgcacatactaacaaccaataggctttctcttggtgctctcaaggacgtcgagggtagcttcaacatgcagagcacccgcggtaacttcagctgcgacgatctccgcaagctgaagagcgacgatgtcatcaagggtaccttcaagtgtgatgccaccaacgccaacgccaccacttccaccggcacttctggctcctctacctcttccagctccaccacctctgctgctaccagctccggtgctgccttcatgaccggcgccaacgttcccgttgttggtattgctgccgtcttcggtgctcttgcccagcttctgtaaggtgttgattagtggaggattcaaatgaccttggggatttttgtacaaaagtctaccaagcagcgagctcaatattcgttccacattgcagttgttacgataataattcggtctttcgtgcagaaaattcgcaatatggattctgacctcgggagacgcctctctggaaggagttcttttcttatccttgtgtttattgctttgctatgttccaatgttcgctcatcgcgtcctaatgcattcggttgcaatttgtaacctgctcgttccctgttgatataccgaaaggggaagctgctgcgggcctgttggtggcatctcggttcttgttgtacttcttgtgtaaacattccttgagtttttttaatgccgtaaccttgccttttattctagttgcgtgcgagataatgattgtgtacctttttccccggacctttattctcatgaaagcagccatcgtacatatgtatcatgctagttctgagtagccatgtctccttggtccattcggcctcggtataccccttagacattgtgtctttgcagtgcctgccgcccgtccaaatagtgtacacacacgaggaatctgtcatccgttttctatatccatcaaagcctgcggctttctcaacaagatatatatccaccatgaatcccattccataaccacgccatgtccaaccaatcgaccactctagttccaactacctcgctacagaccaacttcactagatcccaaagtcaaatctccaaagacctatgaaacatgaaactagtctccccaattccaaatcgcaccgacaagttgaacacagccagcatccacatccatccacatccacacaacaaaacccccggtgaatcaattccaacacaacctagcatgtgtctacctaactagttacatacccaatactactctatcgcacctactccaacaaccccatcctaatctgaggtcataaccgaccagcatcacaaagccagtggatcccggtgggtacgcactaagcgttggacgctagtcactcactgaatatcggtagaacacatccatgtgtgcgttgttcttttttttctttcttggctcgggctagttactaggtaccttagtagttgtgggataggtcaaaggccatggattatgggaaaaggaaagaaaagatgaaacttggttcggcgattcgggctacataggagtcgtccccggggctctctgctcctatgcaccatagtggctgttggggtgcgctttttttcgttggaaggtggaatctgtgggagattggttcggagaattagacaatagtatattatagttacagcgtggaaattggaataaaggaaagtatgagattctattctgttctatttgagctagtaaatatctactcccaagtacataggtaggcccatatggtatgattgtcagtagacattgtatgttgtatgccagggatataatgatagtacaacatagaagtaccttcacactcgttcctaaagctaccatgtgcgtctcagaatcatcctatggccggcatcaagttccgaagcagtcagaaatcgataagtcgaatccacagcgccgggccgcatccctcgatccgattcgaaggctatgtgcgggctcttcactggcgagttacatatgtaccaacgatcgggatcgcagctagcttgaaacggacaacaactttcatcgaatcggaggatgattggtggttggtgtggttggttctcttatccggagaggaatatagggttgaaggaaggctgggacgtttggcgtttcgatagacttggccaatcatgggaggattattttggatattgttatgtattctattagtccgtatatattgcattatgatgaggtacaagtacatattttgagatattactttacaatcgttacttcgcagtcaaggtaattgtgcagtgatagctcgacgcaggtggctgggagaggggaatcggcgatcgttacgctctgaagactattatgcattagccttgcggtcgccggaatcttattttgagagacgaactcccaatcgtgaaaatcaaggaacaggcaatctcaccatttagacttatacaaagtactggtataccgtatagagcagtggatgacgcagggaggggtgttggatgtgtgcatctcatgattgccgcatgtgtcgacttacatgctccagactgtgcctgaacggctaaaatccatatagagaggtgttattttatagaaattggaggaagacagatggaggctgggacaggtacggtgattgacccgtctatagttttttttagaaaatctttcttttctttttgttcctctgcgtttcggggtcacccacttgaaacatttagatgtattcagaggcattctgatctctcggtgtcaagatattcgatctacgaaggcaaaatatcctttgatggagagccgaacagcaccgaacaacggcctgattggccctctctacctctacaacgttgtatctacctctacaacgttgtatattgtaaatttcacgtacttcgtactttgagtggcttttttagtgccctcgatctacatcggcattaaagtgaatatggaactgccaagacaatctcttcatggggtctggcggcgctgagagtggatattgaccctctttttttcttcagaagacgaaactggatcgaacacgggtacacgcaatcagaatatgtaggtaatgttgtcttcttgcctacagaccagcccgggctcagcagctccgcacataaaaagtggagagaagtgcaaggcatggctggcataagaaattacggagcactcggtagttaagaggccatgacagcatacaacataatattaaggtggcaaggagttatcccacaacggaactccgcttctgtatccttgtcagtccaaactgaaatcccccaggaatatgatgcatgcaggccgaaacgagaaaataaaaaataaaaaacaagggtacctgaataaagatgcacatcttcaggtctagccgaccagcagcgtacatccgccttgcattggaggcaaccagcgatccaggtaatgggaaattgtggaggccctgagcgcaccatagtgcgaatcggagcggcaatgcatcatgtaggaaccagatccggacgatcgctcactagaacgagagggaaagcggacggtgtacagagctcctaaagagctccacttcgtatctgtgttgcctcgatcgcgaactccacggggggaggatgtgtgcctgctgtatgtgtatgcatgcacctcgggggcgtccctcgagtgtgatctctcagatgcggcgaatttgagttccagaaatagtccatacaacgtacgtatgtactatgtaccgcgggcgtctgctagatctgtatattaggaagttgtccttgcaggagccggtggcgactgcgccagtcggggaatagattccctacggggattagagagtttctgtatcctcgttcgtggggttggggaattgaaggactttgggctgttggtgttgttttaggattttttcgtacttctgaatggtagatgtctgttgcctattcgagtaatcggtagtgaaccttacattcaagattatcttgtacttcatacggagcatagagtgggcagttaggtcttgatatggccttttctactccgtactgacaattatgatcgtctgcccttgctgctcatgccgttttcaatattggatagcatcatgtacgaggataacaattattgtctgtcaatgctctaaggcggggagagtactctgtacagaggatagtgcccggcgattcatgcaaataacttcctctattgaattgcctaacaggacacagccccttccgtgggatgagtctaacacgagcctaaatcttcatgtttgccactaacaagaacgagtgggaaattctaggcgctccagtagggagacaacacgcatagtatgtagtgcattgtatgtacgaaatttgagaaggcgattctggaaacagggaatagcaatcataatcgaagatctcaaaaaagcctcccccggaaaacgagaggtcgatattgcactcagaaaccacgaatcacattccatggactaagaacccgtccgggtataatatcctacacttcctgattcatgctacaaatataataagtgcaaacagggaagaggatctgacatcgtgcatgaggcgcttttaagcgcttggcgaggtttagcccgatagtattggagcatcccaaatcatcggataatcaagtgactcaaattactccatacattaatctatagtgttcgaataagatttttctaattataccgtccccgcttcgtcaatgacagttgaaacttgacaggtcagaggcggcacgggaaggcgactattggtaatgatttggggagaacaggggagcagagatgctcattggcgatgcgagtaagctttgcgatgacagcgtggaggcgaagggacctgagaagatatgtacttacaaatttgtatatggtggcttgttccttacacatgagagccgcacgggacgcggatcctgtccgagcttggaccgaatgctgtgtaatatagaaacaatatagaagaggggctatgaaagtataatcatcgcatcatttacagccaccgtaagaccacggtagagatgttcatactagaaatgcacagggtagatgtctatgtcctcgatgacacgcacattcacgcagaaacggcccatgatgaaacaaaacccctcagaatcgaacccaagggccaggttcagagtctattcaatgatccgtgaaactcaaaattttcgatttcctagtattaagaagatccggaggggagcccctatatgcacgtcacttaaaatggtaagcagggagggaacaaaaaggacaagcgtgaagatctatggggcccagattgttcggactttccgagcaatcatgtccagagctcgatcgaactcgggttcgtgtgaggttgccctcgagttgctactgttcgtgcggtctgcatatggcgcagagacgtgcgaaagtcagtatgagccaccgatcgggtgcatatgctatacgatgggaacagggaacagggaagagggaactacaactgagtttcagtgaggtttacaaagtacgaaagaggggggcatttaggtgaggttggttatctcttccgggtagaatgcatatacataacagcctgtccttaatttgcatgggctttttgtcacggcaataaataaaaagaataatataataggattgtgaacacgaacggctagaacgtggggactagtgtcctcgatggagtcgccatgcagccagctgattgaaagacgggaagggagaatatgacagctctattccccaacccaccagcggtgttctagtgacaatcgggcaagagagatgagtgatagattaattgtatggagtatattatttgagattatcgagattaaggagatgcaaagagaaatagagaaataaatcgatatgaggactgaacatagggctatccctctccactcagggaacgtgtccatttttaaggtttttagggcttcgctaggaataaaaaccaataaagttaacattctagatattattcccatctgactcgtcaattctctaacgtctgtgtctcacccaattccaaatcatctcgatcgtcatgattcgctgtctgacaggagacgtaccctggtctttgggtctcgtcccaactcgctggtttccccgtcgtttcgggtgacctattctgttgacctgcttctatgactataccgagttaatgatatttggcgtcaatcataacgtcgaaactgtcaatgtgcttatagctacctaggtcgattattcccgatttcattgtatagaactagatccttattcttattgatgtttactttacctcctcgcatgtatcaagatgacactcccgcggtccttgcttgatcctattactgaggggccatttacatttactagaagcgcctcgaggggtattagctcgttgataatagccaaccccttgatactatagcacgatcatagaagtttctcctgactatcgatgcaggagaccggtgtgcattcgttacagcaagcgtttcaccatctacggagatcgcagcgaggatttgatgatgagtacgggcatgaccgcgcatgtagatactgtggagtatgcaggtaaaccttagttcgattcggcgtttttgctttttttgttcttttcggcttcgttctcaccaacaattcccatgtgaattctctggacgttttgatagagactccaacgtcagctattggcatagctattgatgcaagggccataatgcctctaaaaactaaaatattccccgtgtcgatcgcgacaccaacagtccggtgacaaattaggggtcctggatcatcatgaaccttcctctcgggcttgatcgcattcccctcattcgtcgatctgatagattactatgtgaggttcggtctgtgcatgatgtgacagatacgtctgtgataccgaatataattattttcttcgatggcgcttcttcccggcccaagcggacactagcagatggtccagagcacccacccgggatgcccttcgtgcttccccgtcgtcatgaagctgtggggcaaagaagtccatcctctgtctgtatgacatccgaaattccgcgcttcatgtctgtcgaggatcggctggttcatcgatcccctagcctggatctgggaataaggaacaaagtactctcccaatctacatataaacatgcaccccagcccgcatggtatccctttttatgaatatcctcattgtatacactcgcctcgtgtagattccgatttgcttcttcctctattctgtctatagcctgccccctttgtccattactgtgcatatacaaccttgattcatctgcactgtcgccattcaatctacgactcatcgaccctttctacacgaaccacccgtgatctctcagtatatatcctctcggcatagtttgaccacttcgacacactcgccactgcacatatcacgcatttttcgacgaccaactacgatgtacgaagagatgggttctactactgacgatatcacccgccgctgctctttgccgtgagttgcctcactatcctgatatcaatctacatctcctaacatccatccaagttctttccactctagcaccagtatggctgcctcggacgtgggtgagaagcgccgactgcctcctcttcctcagatcttgcctctgccaccccgcggccctttcagcccattcaacgtgaaggacgcccttatccccactaccccgggggtccaggacactttccaattcaagtcaccttgggcagctgccgagcacatcgttactcctccctcgccggccaactctgccgaaggctcctggcaggagtcatttgccactcaaaagtccaactccatcgattggcccactgatctgacgcagagcgagatcatggctctggtggccccacagaatctcaaccgcaaggcacctctccagcagctctgcggccgcaagcgcaagggcagtgcccaatccactgaagatgaccagcgcgagaagcaccgcattgccgagggcaaccgccgcagcaacctcagcgagctgcaccgccagttagacagccgcatccacgatttcttcctcgagcgtgcaggctggaatccttccaagagccttactcaatccaaggagcacatcgtgcaaggagcgatctacctagtcgacttcatgcttgccattattgtccaccttatccggcaggaacaggtcacaccgcagctctcagagaagctgcagccccaggttcgctgcatgcagctgcagcagctagtcagctccctacagcaacaaaaccagactgcccagcagcagctcaaggccaccaaggccgagaacgaggccctcgctgaccgcaaccgcgcccttgagttccagctcaagtcgtacgagcagatgttccgctcccccaagtccgagagcaccagccccggccccgttcttgacttccccgagcacaaacgccagaagaagaatggcctacccggcatgcgggtgctctgcgatgagatcgctgccggcatgccttccgagccttcctatgctgctccctactatgactccatgcctagctcgacctcgcagtcctttggcagttcctatctctctgccacgccgcctatgaccggtccttcttctcctgcctttcccccttcccagtcttcctctttctcatacccagtgccgtcccgtcgccactctctcattacctctccatgaagccgtggagattgatgatgcacgcccgatattgaacactgttcactgatgatatcatgactcttctacctttctgcctgtgccccgtcctccttctcatcagaggcccttgcagcagtgcttgttctccctactatcgggtccgtttggcttcctccttccgtcgtcttcccgcttcatgtgcatttagcgactgcattgtgtaacaatattttgatctcggggatgcaccataggttcccaatttgctttatttcttttcctttgttgattgatttcgttgcgggtttccttttctttttttgcacaaatgcggtggtctttcttctttctttttgtctcttgtcttttggcgttgtttatgatatggatatatgttcaggtggatatattttgccttttgtttatttctttgtttcctttgtcactttctttttttatgtctatagctatgactcaatcgatcatcttggatgaaaatatgctcttgtagaacgatgatagtcctggtagtaaattgtatcatctcccttatcaccatgatttgtgatgatgcatatgccaattctctctcttgtactagtagctatattgatatgcttcccgagctagcacaaccttactctgagaaggaatcagaatacagtaatgcagcaagtgatagatttaggtttatatgtagatatagtacaacccctcgcttgatctcggaccgctgtgcagattgttgtttaggtgaatattaggagcgatatattctcctttcagtggatagtataacatatagatatctactaaagatttcatgaatactgggcctagacatgagaatgcaaagaatattccaatcggtaccatataggatctattccaacgaatcagccgtctctcaggtgtcagccggtggagaccagtccagactgagaaacggacgagttttctccgagtgttttggattgtgactgaattgtattctttctcatgagaatagtagaatagtagttcagatttatacatactagcgtaggaatggtataaaatatagtcgggtccaggccatgtctcactttagcctcgtgttgaagatcccacttgtcatttccaatgcttttattttgtaatctctgtaatcaattaaaatgaatggaattttagggggaaaagagaaatagaagaagaactacaacctcatgttagaatcgacagagatggacaaattaagagtggaaaagtactgtgtcagtgtccacgcaatccatgcagcaaagtggctacatatctaaataggggcacagaatatggagtagatggacagctcatttaattgcacccgtacctgcgtggcaacataataagaagaaacggtgatataatagcccctaaagtgcacgaggttctagatgatccaggctaaataaagggttctcagccgtcacactggttaaggggacaaagtgaataatttgagatgcttagtcgattgtatacgacagtaaaatagccaaagatccctcataactgctcacaatcccatcaacattgcagaataacacgtagaaaaagaaatgtagttgttttactgatctccccccgttcttggcagacaatcgcatttcccccgattcccgattctgttttctccctacccattcgcctcaccattcctctcgacccttttcttttctccacattcgttcggggggttttacaacgagtgttcgagacgggatagcccctggaattctacacaacctcatatcatctctcatcatgttgttgccaaagggtggtgttaattggaaatcggccaaggccagattgcctccatggagggccatcctcgttctattaacacggactcgcttcttggtctccatagccttgaccggtctggtcatcctcatgtggcgcggtgtcagcaggtctgcatcagagatgcaaaggtgagagaaacacgcgatcaaccgagacacccatactgactcgtctggtgccaacagcttctactgctatggctcgagcaagtcacccatggaaatgtccatcaacgagatggtcgaatggagtgcgcacgcccaaacccctgtcctcttcaaccgccacgaaccctacgaagtcaactccaccactatcaccgatctcgacctgaaccccatcaagtctacttccaaggccgctctcaaccgcgaacgtgtactcatcctgactccccttcgtgacgccgctccttacctggccaaatatttcgacctcctttacaaactgtcctacccacacgatttgatcgatctggccttcctcgttggtgactgcaaagatgacaccctcgcaaacctcgcctctgaactcgatcgcatccaaaaccacgccgaggagaaagttcgcttccgtagtgcaactgttattcagaaggatttcggtgccgacgttgagatgaccgtggcagagcgacattcgttcgccgcacagggtccacgacgcaaggctatcgcccgcgcccggaattacctgctctattcggctctgaaggccgatcactcctgggtgtactggcgcgacgtggacattaccgattgccccgagcgtatcctggaggatttcatggcccacgacaaggatatcctcgtgccaagtacgtgcttcttagaatttagatccgacgttggacagctggctgacagtgacattttttttttagatatttggttccaccgttacaaccaggatggccatgatatcgagggtcgctgtatgtatacccacgacaccctgtgtgatgcagattgctgacatctccactcttagttgactacaactcatggatcgaatccgacaagggccgccgcctgcgcgcgtctctgcctaccgataccgttctggccgaaggctacaaagagtacgacactggccgcacctacctggtcggcatgggcgactggcgaaacaacaaggatgaggaggtggagcttgacggaattggtggcgtcaacatcctagtcaaggccgatgtgcaccgctccggcatcaacttccccccctacgccttcgagaaccaagccgagaccgaaggtttcgcccgcatggccaagcgcgctggctaccaggtggttggactgcccaactacgtggtctggcacatcgataccgacgagaagcccggcaaccttggagaccgtaaagcgttctagtttttgcattccgtccgccggaaatctcgattgggatcaagttgatctttgatcccaccccgtccccgaacatccaccagtctccatcgccgcccgtgtgttgtcctcccgatggttaccattaggggctttgaaccgcggcggcttcacttctttcccttctgacccttttcttttccttttttcctctttttgggtggatgtttcgcgacggaaagcctaatgacttccctaatacagagtcttcgtgtcgcgttttagggagtgtgtgtatttgttaccttggcgctagggggaaaatgttgtttggcgggttcgcaggtctataaagttcgccggttctccaggcctctttcctcgatataccgaatctgtgtctgggacacacatcccgagttatgggggtgtgtgtatatccattacactcgagtgattcaatctcgatcatctgttcttcaaacctacattagggacggagaatcggaccgtttattgtcatgtgtcgttttcttgtttcccagtctatttgattctgattctgctacgcaggtcacctccaaattgtcctttcgatttcatcctttttttccgttctgtcatatgctgagctggcgtccttaacattttttttgagatgagagcaggatatcagaccaactcagttgcaatcagatgctgtgtgatgagtctagattcttgcagatgaagcaaggcagatattcgcctgtctgtcgagtttcatgtatataatcaaatgcacgaattcattccctgcaaagatacaagccacatcttacgcatcacgccaagtacgtagttcgctagatctcactcgacggcaatatcatatgggcaaacaataagccaccgctgactaggtttgaatagtatgctctaatttagtaaatacagagttaactagtgaactaactagtcctaaaatgataacttgatacaatcttactcaaacaggttcctatctgcatacccctgcaagaaattgggctaacaacataacgagttaaggctaacaggtaacgtaatcatctctaagccccccgaaagctgtctaagttgcctaactctgacaagatcgagccaatctccaaagatgaaatgatataatcccgactaaaccactttgtttgaaggcgcttgcgatctgcctaatactgcctttgttactccagagggcatgggatctacaggatcgccactataatcaactccagtttcgcttcatcagacaacacgatgacccccgtatctaaaacgtgtcaacgttgcgcagactctaaggtgcgatgtgtccgggataccaatatcgccgcatgtattcggtaggaatccggataacctctccgtggaagaaaactggagctcatctaaagccaggtgccgccgtttggaaaaagaatgtgtacatcgccggactggccgtcgatttaacggctttcataaggaccggtgagctggctttccgtgataaacatggtttaatcgcatctaacccatcacccagtaagatcgccgctctcgagtccaagatcaatgaactcaaggccgaccgtgctggcccaaaaaacaacaacagcacgagcacacgcaatacatcattagctgacggcgatgctcctgaagagatcatcaacagacacttccttgacgtggataccgccgaaaggtacctaagcacgttcaagaccaaactgaccccacacttcccatttgtggttgtaccccctgatgtatctttcaagcagctccgccaggagaaaccgttcctatgcctagcgattcttgcatcggcttcgtacgagaacatgccgctgcagcgggcgctcggcgacgaagtcaagaaagtcgtcgcatctcgcatggtcatcggtggggagatttccttcgagttgcttcaagggctgctcgtgtttctcgcatggtaaccccgattcttatcaatactttgatatttgtgagtgcgtctgacagaatatggcaggttgcattattactcacggccacatcggtatactcaattcctccaactggctataagcatcatgatagatctgcggttggaccgtccgccgcagacacggacgtggaagacagagttgcgcttcgggcttcaatataatctgcaggatcggacgtttaatcggccttcttgggggagcaacgagcagagggctgttttgggctgctactatttgtcgtcatcgtgagttttctttctgtcggggcttattgggtattggctgatagttgtttcgcttaggattgcgatgcttgtgcagaagaaatctactattctacgtctcccgtaccaggaagagtgttgcaagactctccgcgaagccaacgaatatccccacgacaagtacgtcagctatgtgatacagctacagttcattgcggaaaaggtcgacaatttatctgcaaagcatggatttgacttggaaacgcctgggtcggggtcggagctgtatatctcgaatcttaagtcggacctggatgcattctaccgtcatctacccttcgatatcaacgacagctgtaagtcccagcaggacaccaaattcactttcaagatacttgagactaacttatacctgtaaatgaagttcttcttgccatacaataccacgcgacagggcttggcctataccaactagctctcaacatcaccaaccgagatccccaaccccagttcgactccgactcctggaaagatgacatgtcgttctcggcacttatctcagccagttcgattctcaatctctacattgaactcccatcgaacgaggaagtcggattcaacaatacacaatgggtacagatagcatttgccttgctagttacctatcgacataccgtggcagcctcgaagccagatcaaactgctgccttcctacagactctgtcaaaattgaaatcgagggttggggcgttgtctacctctgatgtagatatgaaaggcgctcgagatgctttcttcgactttaagaaccgtatagttcaaatcgagaactggcttcaggggcatgatagacaggaggataactcccccagcgaggagaactttgaagagtttcaacatacgttatgcgtggaatccgagccgacgcactttgacgggtttacggaggctgtcgagacggaggatcttgatgtcactctgtggaatttattttcatcttcggcatcgggcttgcaaatgccccatgattttctatttgcatcttcttctgagcagattgtgggtgattgggtatgattatgatttcatttacggagctaccgaataaatctcaatattgtcttacctcttcgtatccatttcctccagttagtagtcaaaggaattgccaacatggaagatatcaaacaaatactgagaaatacgtgaaagcagaactgaataaggggcagtgctgtgactcagagtttctaagttgcgctgatcgaatccttcttgtatcgccgagccgatctatacaacgcgccaagaccttcagcatcaccgacccgattctgaaatataaaaaataaatatagatggaagacggatttgaatccaaatcaattgctattcagtcaaaatgccttcaatctcttacgctccattcttcttgctcttctcttcggccctctctttcaccccatgtccactcctcggccctgcattccctccgttttccctcgacacaaacgacaaaactgttgcaggggccctgcaaaagcttacacagaagtttgacaccctagtcgcaactaataatggcactcatggggatacctcgccaaacaccacctttagcatcgccttgttctcgtctgacgccgggaatgccgaagacgagcccttcttctggcaatatcatcacacagctcctatattgaaccagtctttggtaggatctcacactgcggacaaagacagcatttaccgcattggtggtctcactgaagtcttcactgtgtggagtcttcttcttgccggagacggagaccagatatttgatgatcctgttaccaagcacctccctgagctgattgataatactacaagggaacaagatatgaatggacgtgtaagatgggaggatgttactgttggtcagctcgcgagtcatatgtctggaattgtgagggactgtgagtaggacaccgaacagggcaaggttgttggttatcagagctaattcatgaatagattgctcgacggatgtgactttgcaaacaagttctgctgaggctggactacctccactccaggctatcagcataccttgctgtggtggtgattccaagtgtgatagcagtggtatgagattcaagtccgtgcctgctctctgtatactaatctctttatagatttcattcgacacctggccaaccaaactcgcgtggctccggctggggaaactccaatctattccaacatggcattccagcttctaggctacatagtagaaaagcgcacaggaaagcccttcagcaaagtcctacatcacatatttgacgtcctaggcatggccgaaacctcgatctttgcgccaaacagcaccactgcaggcatcattcccgtgagcaaagaagccagtggttggtcagcacacctcgaagcagacatagcgcaagttcatactctccccaccacatcccagtcaccaatctaacagtgcacccactgcagatcaaaatccattttctccagtgtcaaagatctcgcaacagccggccaagcaatcctaaactcaaccctactcagcaaaccccaaacaaatcgctggttcaagccagtctcccacacctctaacccggccaactccatcggatccccatgggtcatatacagtgccggctcataccccaacacatccatggtggacatctacacagttctcagcaacgaaggcaacgacaagagtctttacagctcatatctcggcctggtccctgatttcggcgtcggctttgccattctctcggccgatagcgacaccccagcagatctcaacgcgcacgcagatgatatcggtgatgtcgtgctaacagcgttgatggaaacggctaccgagcaggcagcccgcaatttcggtggcgaatacaaggtatccaatatcaattcgtctattgttgttgagtacgatagcttgcctggtttatatatccaggagtttgtcagtaatggtaccgactttcgtgcaacgctggctgggctcgtgggtgtcgcgaagccggcggatctgagtattcgattgtatcctacacagctggttgaggattctggatctggctccaagcaggggtttagagctgtctttcaggatgtgactgagttggcggatgctggaactgcgacttgtgtgtcgtggctagatattggaaggctccggtatggaggccatggcttggatgagttcatcttttctctggatcagagtggtcaggctgtcagtgttgagattccagctttgcgaatctcgttgcaaaagagctagctaagggctgatcttcttgcttgaagtctctttttttatgtgacatcacttttggagagccgtgccaccagacatcgaatatataaacgaagctattcggtttgctgaacctcaacttcctctgacttccttcgactagtaaagttcaagacatcatccaagcaagatatcatcatgcacgtgacccacgataaccttgctgacatacgcattgatggcccggggcctgagctcataaagcggctcaaataggaaagcccccctagggaaaaatccgtatacatcgaggtactttgtaggcgcgtactttgtacagaaacccccgtccacaatccaacatttcactcccttcaccatgccactgcgtctcacccgcgtcattcaaagcaaagtccccgctttcccccacgcgcggcaaccattcctccgcgtcccgccatcacacttcttctcctcctgcccctcagcgtcgatcaaaccttcccttgtacctagaaaatcaattctagccttccaagcccgcaatatgtcttccgcccctgctaagcgagagttcctctgcatcctgcccgataagcccggtgcgcaggcgaagcgtcttgaggttcgcccgtgagtcctctctagcatctagcttccagcgtgcgacgtactccgggatgatgagtctggctaatgcggtctttagtaaccacctcgagggcgttaagccacacgttgcgtccggcacaattgttgccgctggtatgtgacccatttcttcccttatgtagttagattgtggtatgggagcttctcaagcatttgtactgatatggattgtctcttgttcaggcgcaatgctcaatgctcaccccgccgatggcgagacaccctccttcaagggaagcatggtgatggctgttgcggagaatgaggcccaggtccttgagctgcttaacaatgatatctataccactactggtgtgtgggatatggagaaggcgcagattattccggtatgttaggcaggaagagtagaggattgtctggtttttttacctgctcattgctaacttgttttctggtttagttcaagtctgctgttcgtcaggctttgtaagttgcatgtctagtttagctttgcattggatctgggacttgacatttgtcgtttatattgaataaaaacaactggtcattgagcttgtgttgtgtctagatgcctttgggctatgtggggtggtctgttatacttttaagagcgcatagcttgatagatatagttggcttaatcagtgagaaagccgaggatagacacggttagcccggtacttttctatctgggcacggagtctccgtatggagtatggatatcccgattggaataagccgagcacaggaactatactccgattttatctccgaatgccagcgtgtatcatttcgatggaaccctggaatgtacggaatagtaatagcccgataaacgtagattgtattcgaatggtcgaagaatctaagaacaccaaaatgatgattgatcgcccagcgttgactttacgcctatcactcctatccactatttgatatcatcgcccaacaattggcccaaggcgaggcggaaaacaagacgttgaccgggcgagtccaccgcggagaacttcagtggtgcacaaaggtcgccaccccttggaactgatatcaccagcacgtactctcactggcacagagaaagaataccccaacttttctcatcccgcacatcattttaaatccagcgaagactgaggaagggaggaacggacgtcatctttgtcatctccgacgaccggcggatccggccaaaggaactaccccattaggcctagcgtgcttatctaagagccgatcagattatttatgaattcatcacttcctccctatcagatccatcttttttttgcctcccaacacatatcaccggtgcaaatcaatacccatattccatcaaatatacccatcataattcaattcaaaatgttcaagcgtttagtcactgttgctcctcgcgtcggctccgtcgcgacacgcagctctctttctcccctcactggcttgcagtccgctcaacccgccatccgccgtgctgctcctgccccagcccaacagcgcagaggatatcacgagaaggttctcgaccactacaacaacccccgcaatgttggctccatgcagaagggcgaccaggacgtgggtaccggcctcgtcggtgcacccgcctgtggcgatgtcatgaagctgcagatccgcgtcaataaggactctggccgtatcgatgatgtcgtcttcaagacattcggttgtggtagtgctatcgcttcatccagttatctgacagagctcgttcgcggtatgaccctcgacgaggctggcaaggtcaagaataccgatgtggcgaaggagttgtgcctgcctcctgtcaagcgtatgtctctctttgatgcatttggttgattcacatgctaacttctctatcttagtgcactgctccatgctcgcagaggacgctatcaagtctgccattgccaactactacaccaagaaccccaacacccgtaccacagatctgtccgggacgggcggtgtcattcctgacgttaaggttgagactgtcaacagcccttctgcttccctttaaattcatttttgatttgatttgacggtgtgacgctctcggatggattctccatctgaatgacgcaaccccactcgttccgtttcacgaactctgcgatttttaattccgaggttgtcttaatacacaatcatttgatcaaggatgctgttgttttgtcggagagaatcgacaagaacgggtgtacttggagttcgttgtacttggtgtcgctgaaaatgtgtaccaagagatgacgatggatgagatgaaaacgaacaaattgaccatttgtttgatgtacatattttctttttttagtttcacgttctcatacgttgtgtcttgttctttttttttttttttctgcgatggcgcctcggggatccttgatcgatactctcatctctttcgaaaacagcgcgccttgatagtttccaatgaaacagtgaacccagaacagtcaccctctgtaaaagtagagtaatatcagaagcagtctatgattcatgatttatccacaatctatctatttgtacaagaccacactgggtctgcgagaacaccgcataacgaagccccaaacatagcacaatccacccttcaacaatatagccaagagctgaagaggccacatgcgaaaagaaatatagaacgccatcgctgatgcacagacagaccactcaagacaatccaatccgtgccaatgaaccaagggacaaaacaagggatataatggaataaagaagaaagacaccgagcgcaagccatccctcccaaaaaagaacattgtctaaacgctccggaggccgaagcgagacttcaaggacaacacagtctcataaaccgacaatttgacctcaacacgaaggtagctcgcgtaggcccacaggaagcggaagaagttgcggaagacaccgccagactcgttgatgagatctaactgctcttcgaaaacggttcgtgtggcatatcgcgcgaggatgaggaaagagcgcattgggccctggcgtgtgtgtaggttttcgtctaggctgcgagctggggaggggttagtcgatgataatccaaaagaagagagggtcgaaagcgaagtacatactaaggtcattggtcttcaagatgagaagaataatccgtggaacctggcctagcaagacaaccagctgttgtagcatgccctcacccaatgcaccagaaatatcatccttctctttagccgtccgcggggagacgacgctttccttcgtgataacgctgtagtctcgaccagtaatggcgctggcaaagagcgggaattgcttgtccgtgacgccggcgaccttgtatgcgaattcgcgcatccgtggcacgtccccatcgataacggctagccatagcttggcgtagttgcggcgcaggtcgcggtcgatgttgcggtagagcccgtggtcatagaggacgacgtcgaagttggggtgtgagcgggtgtggttcggacggatggcgatgttgccgccgtgaggatcacagtggagtggagcgttgtcgccgaagatcatttcgttgaagatgtgcgcgagggcggcggagacttcgtcacggtcgatgtggttggcatctagatacgccaggtcgtcggggcggtggcctgcaatgtactccatgacgaggatacgtctttgagaccacatcacttgaatctagttagcctcaggttacacatataaagacagagtcggcagcattacaaaccttcaggaatgaccagcggggcatcggtgtgctttttgaagtactcgctggcatgagtagcattctgggcttccatgcggaagtccagttcttgcggcagcgagaagtccatttccttagacaaccattccaggtcgtagtcagggaagaagcgcttcagcatggagaaagtgaatcgagtcaaagccaagtccagcggcacccattcgtccagcgcgggatgctgcactttaacagcgaccttctgtccagtttccttcaacgtagcaatgtgcacctgtgccagcgatgcagcaccgatgggcttctcttcaaaagaggcgaacaactcattcatactctgccctgtgtccttccggaacaactcgtcaattgactcaattgacgaaacggggcatcggtcctggagcgggatgaaggtcgaggtccattcgatgggaagcaggtagcccatgctgctgaggtgctggcccaatttgatgaaaatcgatccattcttttctaggacatggagtgtacgctcggcacatcgcttgtggcatgcgtgaatcagtgcgttatgttcttcgggggacaaggcggcttgtttgagggtaacacggtagctgcgaagatttgaggttgcgtcagcaattttgtcaaggcacagcatatagaaggcccacagggtccccacgcctcacttactcgttgatacagacagctagtgcgcctacaacgcgcccactgcgtttggccgcacccaacgcatgctgcgcttgatcggagaacgtcactgtgcccagaccgaggatacttccaatgataaaccactttatcatactccgctgcgatgcattcatattaggctcattttcggacttgtgctggctcttagcccccgcagacaagagaggcgaagccttgacagagaaagaacagcgtgaagaggcgagggtcgagccgtgggtagacaccgagcgagtccatgacgaagtattgattctaccaaaggagggcgagtgttgtagcagcgagttcgaggctagaagaaacgaggatccagatgtcgagggtttggatgtcaccgtagcgggatcaatcttgaatgtccgcaacgacacgcgaagcgctgcgctcatcccgaagcgaaggccaccggccagaaaaaaaccaaagaaaagaggaaatgactgatagtgcttgttggcgtttctgggctcaatccatcgtatgattctctgtcggctcagagagatttttcacggttctcgccgccaatcggcttcgatgctgcacgtgatccgatatagatcagcccataacagacgtcatagctaatttggcgtcgaatgcatttggacaaggcgtttgactggtagatctgatagtgaagcaagcatccaaacggattgtgaaggtgtatcgtaaaagaaacagagaaaatgggataaaaaccgtatatcaatggctggccttaagccgccaacaatacaatgatgcctatactatgtctatgagcctatgtcaagtacacttatgcaaattagaataattattgattcgaacaaaaaaaacatagactctatgtgcagcaaccagtgctcacataataacaagaagggttttacaaacagtaaaaccatgcaccatcactccaaagtccattttagagttgacaacgccgttgcctgagtatgaaccaggctaggatgacctagagaaattgaaacgtaataacacaaacatgtaaattcgcagtagaacctttggacgtcaaactacgtccactcaggctctgcgagtgttgggcggcggcgacgaggaatgattgaaggccgccgactcaggcttggagtcttgttgtcttcctcacgcagtaagtcaacgtgactcagtctattagagaggggccgtgttgacctgggcctgctagcgaccgcagagcttccattggcgacagatccaagaactggattgctgccatcccgactgccaggtctcatgaccagagaagaaacgctgagagagttgcgcgggtgtcggggagtatcccgaccttccaggtatccccttgactggccgcggttagctgagggtgtggatggggtagaggttgccgagaataagattggaggggtagtgcatgtgctttgtcgtcgggctgtcggtctgcgtttgctgacgccatacgcttcgctggatcgaaccagcttgcctgccatatcccttacgaggactgcggggtcgttttccatgttccgaatagcgtcgagaagaccataggttgcgagtagcccaccttgctcttcatttgaatcgcaaatactggctattatgcgcaaaaggttgagtcggacggcagctttggcgtgatgcagcttctgcctcagtctctggaagatatcaggccgcgcaaaagtggatgcgacaggaggactgagccgaagaagcttttgcagaggttcgagagtgttttcgaatgcgttagctttggaaagcttcaaacattccgcaatggcaccagtaaatgtaatggggccctcaaacgtatcactctcaaatatgccatccaagagatgctcttcaaccttggcggtttcttcttgaagcctaattattattcattgtcagctttgggaccagtcacgctttcagaacgggagacaaaccatgtaaaaatagcatccaaggcagtgacttgccaatatggatccaagagcaaagagatgtagaagcccaggcccttgttgcgccatagctccctacggccaacttttccagattgtgccatgtcgcagagaattggtagggcaaactctttcagcggccgctctgtaagtacgatcttttgcagaagcgggacaatgccgttcagtgcagcatcttcttgcctagacttgtttaggcggcacatattgtagatggtgttgaggatctggttcgagagctcgcggaaatgcgattttctcagatttgatcgaagcagatcggtcaagacatcgatggcgttggaattctggagcgaatctagagtagttgaaagcatcgacaggtttttgatgaatttcaacatcgtaatttgatggactgggctcattcgtctcaattctttcaagaccccttgaatcaattgttagcatagaacgttgcaagggttgttaggcggatgattcttactgtgcaagactgttcgttcagaaaccatctccttaacatgattctcggcctgcgagaatatgaagaagatattagcaatacgaccctcgataacttctgtcaactccccatcttcatcgagagcacgactgagaacaagagacaggggatcaaggacggagttgcgggataggattctacagaaatcgttcttgggagtggagccctaaagaaaatggttagatccgaggagatgcaaagtgcaatgaaggcgaagtacttacttgcagctcaaagacactccagattccgttcacaccaatcaagactagttcacgttcatcttcataatcatcctcgaggaactcgaccaggacattcaaacctccagcactgacgaacatctggagagtcaaggtagaagtctggtacatctgctgcacgaaagccgcagcctcaaggcgaatttcgcgggggtacttcttggatgcaaactcattgatgatagggattccaccgacgaagcaaaggttttcctggacctcatagtcatcgtagatgatcgcgttgacaaccctcaacagacagaggacaatatcacgccggcgagtagtgtcaagaatctcgagaattggcagcatgccgtgagcactgatgatgatgtttttagtctctgggaggtcacagaaaattgtgaacaattgatcagaaatctctgcaagaacctcttcgtcttgggatgtcttgagagagtccacaagaccctcaacttggttgcgaagacgtgcgtatttatcgcgcgcaatattttcttcgaggtcgacctcatcaaagccttcttctaattgcgcaaaggggtcatcttcgtcttcttgatctcctagccaagagttggacagcttcgagttgagcatcaatgtactttgatctgaaccatcgtcgctctctgtcagatcaagggtagcttggtcggctccaagaatatcagagaagtcctcatcgttctcattctcagcaaacctctggatctcaatggtagagcggtcgcgcttcacagaaagctgtttgcgcagctggggatgctgaccaccaaaatcgtcatctacttggttgtatcctatgttttcatgaatgggtgatgatggatcatcctcggagtcctggaaaatgttagaataatacggtgaacttatagtcttgccggagactgtacctgataaacacccagctttcgatcgagtacatcctcattggccataatgagatctgaataatcatcgacagagttctctttatagagattggtcgcacgaggaggcggacgagtgcgtctcggcatcggattttgggagaggattgggacattttgcagtgcagaaatagggacattggatccgggctgatagaccgcagggctttgagacttggaaggctctactacattatgtttgatgggatatgggcgaattgtctgcaagtcgtcgtctgagaagcctgagttatcctcaaaggggtcagaactatcatccgatttgagtatggtcccatcgagtgaagcaaaagctttaagtctctcagaagagagcatgccaccgaagttatcatgtggccgtagatgcggcagcttgagtgcgctaggagagattgcagtagcaaagtcatcgtcccaattgtcatcccctgctgagacaggtgagcgaaagcgatccgtgggtttcatagaggttggcgatggcagggtgtcgaccaatgggttattccgggtagatggcaggcctgaagtactggggtggtctggtctctgcttcttctttgaagtccccgcttcgggggaccgcaaagcctcgttccattcttgcacactcttgacggcttcttcatattctgtggactttttggggatcacagattcggttctgcgcgcatttacaatccaaggatgcttaagcaactttcttgctgagactcgaaggttggggtctttctggaaacattgcataaggaagtctttcacagcctagataaaagtcagtcttgcatgcatatgttgaaacgatcgataaagacgtaccggcgaggcaccctgcgaaaatggagggtgatcatcgtttacaatacgaaatagtgctggcataggctgcatgttatgatacgggggtttcccctcgagtagctcgatgacagtgcatcctaaactccagatatcggaagctgttgttgcgcctgaaagctcgattacctcaggggccatccagtacggtgtaccaaccacgcttgattcactcaagcccgtggtccgactcgccacaccaaaatctgcaagcttgacgagtccttcttttgtggttagaatgtttgcacccttgatgtctcggtgaataacaccctgttcatgcaagtagagtaaaccatgaagaacctgggacatataaagacccacaaggttctcggggaaacgaccaaagttcttcgcgatggaatgcaacgagccattttcgcaatatctataagacattaattctatgttcccttgaatttgacccgggagagacatactcgagaatgatattcagagtttcgacggatttcacaaatccatggtacttcacaatgttcgggtgctgcaagaatctatatcagtacggtgtttgttgacatagcttgacggggttgtctcacatcgagatttttgagaagatcgatttcaagctgttgcgtcgcatgttagcagatcagacgaactccgagaacgattagatcccataccatgataacgcgcaattcactcttgggaaggtctgtcaacttgatttgcttgacagcgacagtctccccagtattccaattcaacgcgcgatacacggagccgaaagctcctttgcctaagcagtctcccaattgctagcatcaacacccaatgtcagcatctgcccaatccatattttgcggggaaacagggcaccatattcatacgtagtccttgagctctgcaacatcttttgccgacgacttcaaaactttatcatccttcggtttctcttctcgcttcgtaggactcgttccgactcgtgtcaatcgcggctttatcggggttccgggggttctcgaggatggggtgagagggcgaggctgctgcccttcgctcccttcgccgggccgagcgaccatgatgcagcaagctaggatcaaatgtatcctagtatgtgttcgagttggctgtcggtctcacgatgtggtttgatggagggggtggggtgaaagctgaggaaggaggcaaccttagaagagctgatcgcaacggtctcagaggtcatgtccacaggatctggcaaacataattggcaattagtccgagtctatcaaggcacaaacaagcatcacaagagacgttcgcgtgcggtcgttgtggggaaagtctcaccaagtgcacattacagcacttcagctctcacgccctagagagctgtttccacgacaagtcgaggtgcatgtaaggtcttcagatggtagcaattaccatgcagaattctgaagaatagcgacctagtagaggtgacaatagaatgtgaaagagggttgttcgcaaagaatcgttgttgttttgaactttcgttctccacccgccgcatcatgcaggctgtgctggacaatcgccgatcagccctgccataccattttggtagatttttattatttgaccaaaaggatcacaatatcttgatgtatagctgtactttactaagaggaatgagaggtagaaaatgaaataacgcttgttgttgctgtggggttatttaccgctatagatcggggaaatccaatctgatctatacagggtatcatttttgggcacggagaaggcgcattacatctgaaacaaggtacaaactaccagcaataacaagaggacccccttgagactgctcactagcccaccgaagggcaggcagtaaatctccttcgaagctctggacttggccaatattttggatagcttcgatggaggaggcaagctctttggcgttagttggtcggacccagggcatcccgtccacgggaccaaattcggcggtggcgactcggtctccgggccggataatcgaaccaaaaaccccagctagatcctttccacttgacgcggcaacaacccaagtcacaggttggccttgaaaacgcattttgcggtccacatacttgccgagaacttcggcagattgagcattgtgggcaccatcaagcaggataggctctgcacggccaatcaaaggttggaggtcaattttttgcaaacggcctggccatgttacgtcggccagatatggaagcaacgagaatgcatccatctcaggtcgtagttgagaaagggcaagacgaagtgcggacactgcgcaacacatgttttcttgttggtgaggctctagatcaagcttctggaagtaagatgcaagtgcgggaatttgttcggaaaccgttgcgggagagacaaacaaggaatcaatacccagttctcgaatgcgtgccctcacagtttcaatcacttccggactgtttgtattgtctaccacacaagggactccaggcttgaggattcccgccttctcacgggcaatctccctaattgttgttccaaggaaagcctggtggtccacccctatctttgtaatgaccgagacgagaacattattcaagatatttgttgcatccaggcggcctcccatacccacctcaaccacaccgacttcgacccgttcatggttgaatatctcgaacgccgttgcggtcaacaactcgaattcggaggcaccgatgcctagggtttgatctcgtagtctgacttggtcttcaatctgtcggaaaagggattctttgaccactttctctccaattgtaatacagtcccaccgatcaattaaatgcggggaggtgaagcggccacaacgcactccgccggtggacagcaaatgggaaaggtaggcactgatagatcctttcccgttggttccagcaatgtgaatggccttccatgagagcgtagtctgctgaagcagactcgcgacccgactcaatcccaactcaatcattcctccaagtgtgacgtgataggaatttcgaggtcaattgtcgaggtcaattgtcgaggtcaattgtcgaggtcaattgtcgaggtcaattcattatcgcccgaaggattagggagcgacaagatgattcaggatttcaatgcttcattgtcaataagtaaagcagagcccgaatgcgcgtagcccaccttccaaagtcggagcttaatcggaggaataaccccacgtgacattctcattcgcatacttccgatatgatgctctccgttctttactgacaatgggagaagtttttataatatccacccatttaccagttaactcaatcaagggcatttatacttattgattgtcaatcgagacattgcacgaataggctattgaaagatgtctagacaagtcacacgtgacctagccattctagccatcacaacctcaggcattcacaactctaaaaatccaatcgatctctcccgtctccatctcccatctccaccgttatcgcatgtcgcgtcctaattccataattgccttttcggtctttatttgtccttatttattaaacctctttgtttacctgcctttctttctgccccaaaagtaaaatgggtatcccgtaagtcatccattcctcacgtgggcgcgcgaagctatcgcatgcgccactgtttcgaggcataatgttgacttgatctacagtatgtggcgtgagcctcccaagtccgaagcattcaagtccacatcagaaaaggacacttctgctactgcacgctcatcgattcgccgagcaccgtcgcgaaacactagctcccgcgtgcgccgtgccgatatcctggcttcgtttcattcacagatcattgatgagctccgacgcggcgccgtggaacctagacgtgtgccgcgcttttctttcattgcgccgaacgggaatgtcgacaatgcagtggctgtggaaccggccgatcgtgtggccctcagcagctgggctcggtcggaagccgcaagtacaaaccgacagacagatacaacagtagccaatcagctgttcagaaatcatcgcgatcaagccttggccgagcttttcggtcgcatggacggtcagcccggtaacaccaatgccagtccttcattgactcccaacttcgctcccgctatcgcataccacaccagcgcttcgtcgactccttcggacagcggccttcgtctcccccctatgcgtgagagatacaacagtgatcgcacctctaatacctcattcccacccgagatccctgaataccggtctaacaacacacaaacccggccaaaccgagaccccgtcgtagacgggcttggggatcgccaacgcagtcccagtccagacgaagagcgggaaagcgttgtgtgggagactttactctcaaccattgcacccgatgagactcttccatcaactaatacttctttcacttcaacttctgctgccgttccagatatttcgcgcaaccctcgtcctcgcagctctgtcaacttgacgcagccgatgaccgcggaagctgctcgtactcacttcggacttgacccttatcctgaccaactcaatccttgcgacttctcttccgatgatgaggaacctccctctactctccaggaattcattggacgacgacgggcaggccgttatcctgatcagcattcgactatgagcaaccatcctcctgttcctatccctacaatcatccctgcaagcgttcttgctctctctgacgcgcgccgccaaaattcctccctctccgatcgtcaccagaacgatgacctccaccacatgcaggtcatcctggaccgacttgctcgtcgtgaggatattcccgacgactggtgggctgcggctggcctcgcacgcactctcgaccgtggttccagtgcgagcatggactccactgacaccgagggcgcatcccgaaccaaccgcgacaattgaacactgctagtcatgtggtgatgctgaatgatacgagatttgatattggcgatattggaaatgggcgttttccggcggatctcacgggtttttaatttgaatatcggcgttgacaggtcctttcgaggctgctttgtaatcttacattttccggtttccttgtcgattattggacaaacggacacgaacggccacctcgggggtcttttcaatattatctgtcctcaacttttcccttctgtaactttttatatcttcggggattctgattcttccactgtccagacataaatagaacatatttactttcggtgcctgccaagtccagtgacgtatatctctcggagtacagcagtccccacttggagagccccgccaatatgtgaggtcgggggaaattatgcttagtccaacaactcaaagaggcaaataacatacaaagtagttagatccagtgtcaaaaattgccttgtacactgatctgcaacactcaagcgtactacaacacgttgctcaaaccaattcagggcgttccttccctcggatatttcttatcatacacatttgatcccagcgtgaccactagccaactatggatcaacaggtagaccgactggtcaacaagacctggggtgagtagatccaagaacaagcacaagctcgaattactcctgctatcccaccccaccatcaacgctacaaccacgtccaactaacaacccatcccagcaaaactctgctcaacagcagacgacgcgcgcctaatgatcgccatcagcgggattccaggatctggcaagacaggtctagcaacgatgatggcagcgcggattaacaaaatctacgcctcggaaaaccccacaatgccaacaccaatagccatcgccctcccaatggacgggtaccacctgacacgcgcacagctagccgccatgccggacccggtgaatgcggcagcacgacgaggtgcggcgtttactttcgacggcgagaaattcctcgagcttgtgcaggctctgcgagagccgcttacgggccggacgggaagtctctatgcgccgagctttgaccatgctattaaggatccggttgatggggatattgccatcccggcgagttgtcgagtgctgttttttgaggggaattatcttagcttggatcaggagccgtggaaaacggctgcttcgttgatggatgagctttggtttgtggatgttgattttgaggttgcgaggaagaggttggtggttaggcatgttaaggcggggattgcgagggatgaggttgaggcggataagagggctagagagaatgacttggttaatgggagggagattgtggatcataggttgccggtgcaggaggttgtttctagtatttttgatcctgtttgggagaagtgggcaatgtgatcttgacgaaggctatgatgtacagagttattactatgttgatttgagtatccttgtgttattaggaattcaaaacacgtccagcgactatatccttggcataggaaatagctcggacggattctgtgaatttgtgaaggacaaaaagtccgatagaaagatgatagcaaagtgggttttaaagtcgtactagactttctcatagagacatactcggtccctacgatgtatacatatcgatatgctctacagattgcatattttgaagtagtagtaacacactagctgtttcgcgagatcgatatccacccatcttggtctatagttatcgagatactagctctataacccccagcactagcgtaagtgaaacccttcttaactcgacgtttagatactgatggatcccggcttctcctatcatgacgccgatttgactatgtggtttctagcccatggagcaaaccctaaccagcgatgtggtaaagatcgcaccccactgtctaccgcttttcaagttgccagcttcgaaatcattcagaagcttcttgaacacggtgtcgatgtattccaaggccaggtgctgcattatgcggcaagacgccgattggatgatcgactccaagttctcggtttcctccttgagaaaggtctaccgatcaacaacatcatgtttctgtactccgatgactattacgccaatatgtttgacggtattggtactccgcttcattatgcggctgatgcgggtctacttgccctgtcaaatttctggttgagagaggagcgtcagcaagaatccgagatcccgcaggacgaatcgctctcaattgggccgaattcaaggccgtaactgattttttcgtccattgtctgttgagaatgaccaacatctcgttgcacaatttacagatgaacctgggcgccactttacccttaatggaggaattcatggcaaaaaacgactactacttcgttaacatttagttacatgatttttcggggtttcttgaactcgttatagttgaatagtccgatatatgttcattctactatgacagccgatcgtctgacacacaggcgcactggttatccggatatatgttgtagtatatcatcatccgcagtacactcccgcaaaaggaacatcatcaaggcggcaaaatgacatcctcatcttatcaccacctcccatcatcgaccagagatcgaagagggtatatatccaacatttcatctaccccggaaatttgtcatactgatccacaatcgggcatgcttcaagaacctttacacatcgaagctctttatcggaataatccaggcttccatcttcaagggtctcgattggtgcacctttcagcgtttgcagagattcttcattgataatcatgcacattcgccatttggtccaaccgtcacgcatgccttgagtgtccacccaggcctcaaataagcacgaattgcctcaagagacgccccgttaaattgcgccggattttgcaagatggtcgaccggtgtttggcccagatttcattaggctcatttggtggatattctttggtttcttggaagaatccttgcttgaaacaggcctcaataaaccgaatagcgtctggaaatagagtatctgaatcagcggagtaggtagtgcgatatatgacaaatccccagtctgggtaagtgccgaggttatctcggagctcgtccatgttgaattaattgttttaatcgcgattgcgtagaatttgagttggtggttgaggaggaaagagatgaggaagggaaagaaagtctggagtcttctgccaaattgtcgttacagctccccaaccacgaacccacatcaccaggcttgggacctgctagatctgttacatggttggcttcgtggcactcgatatgtgtctagcttggacagcgaaccacacaggccaggagaaaatgatccgtctgtatcaagcatgaagaaataactatatctatcctatattccggcactttatcctagctgcagacattatagattgtactcagagtggtgtgcacgagcaagagagagaatagatcactggcgtatggaactcaggatcgagaacctggaaccgtccctatggggatcagctgtcgaagtccatataccaaaagtaaaaagggtacaggtcagacatgtgaaaagaattagttcgatgaacaagcacagcgactactttaattaagagaaagagtccaaacgcaaacagcgtgtcttaccccacaaagaaatggcaaaaaaggacattcccatccagtgcctggggttatactcccaggtcgccacttaggggatcataatgcttaagtaaccccaaccagctttaccctaagatctagtcgtccccaactgcaggcacacattgtcggacctccacagcgcgcgtatcgatctcgcgcgctccagcgggtccagaccggtaccagcaaggtgggcaattaggggagcataattggaacatttatgaccgtgcactgggtgggtcgaacgctggcagctaggacctaaactagcattgaaaacgcatgtcaacacactcagccactgggggaatgtcggttagggggaaggtgttgctatgaaatatataggaacaaacacttcctaaaggggaaggtgggtccgctccaccacattgcttatcacgtgatgatgtctgaatgtactatgaagaatgaatccttgtaatatacatcgtttaatccaaaaaggtatagacctacacataatgaaatcgtggaatggtaaagcgaagtggccgctctacttttcacttctccctcacttgaccttttctccttctctcacttgaccttttctccttcttctcgccttctcatcttctgttgggtgcccgaactttcaacttttaggacgagtccggtatcctcctcataaccggcgaggcgtcctttccacgcccttggtgcggccttattgatcatcctgggccttttcctcattcagagatacctccctcgcgcgtatcaataccctttcatacacctcttagtcttcgactgaagggaagcgagaaccggtgaacaaggatgggaaccgtctcaacacctcttactttatatatgcctcgagtgcataaagaagatacctggaagttcctgcgcaacttagacagcgttggtctgaacttgaacctgaacctgaaaatcgtcgaataccttcaagaacacctcaccatggtttctctcctgatctaccagctttttaccccgagctattgacctctggggatccccggtgtaccagaagcttaacccacacttcgaagcccccggctataatgaataaggtccttcgatctaagaatgactttctgactgattaccaagaagcttccatgagacagagctggttttttcctcgggaccacacatcggttttcttcgcctattgtcgaaaatattatgcacacaatgatcttgactgtttcgaccagtcatatatctagtatcggcgttgatggatgctagtattttcgcgattattgagtttatggatttaaggctggcttcaatcaatgtgagggagcatattacatagcttacataagctctaggtggttacaccgagagcgtacagtcatgtttcatgagtatttgcaccccagtacttcggggggggggggggccttnnnnnnnnnnnnnnnnnnnnnnnnnnnnnnnnnnnnnnnnnnnnnnnnnnnnnnnnnnnnnnnnnnnnnnnnnnnnnnnnnnnnnnnnnnnnnnnnnnnnnnnnnnnnnnnnnnnnnnnnnnnnnnnnnnnnnnnnnnnnnnnnnnnnnnnnnnnnnnnnnnnnnnnnnnnnnnnnnnnnnnnnnnnnnnnnnnnnnnnnnnnnnnnnnnnnnnnnnnnnnnnnnnnnnnnnnnnnnnnnnnnnnnnnnnnnnnnnnnnnnnnnnnnnnnnnnnnnnnnnnnnnnnnnnnnnnnnnnnnnnnnnnnnnnnnnnnnnnnnnnnnnnnnnnnnnnnnnnnnnnnnnnnnnnnnnnnnnnnnnnnnnnnnnnnnnnnnnnnnnnnnnnnnnnnnnnnnnnnnnnnnnnnnnnnnnnnnnnnnnnnnnnnnnnnnnnnnnnnnnnnnnnnnnnnnnnnnnnnnnnnnttcttgcttacttgcttgcttacttgcttgcttacttgcttacttgcttacttgcttgcttacttgcttacttgcttgcttacctacttagttacttgcttacttgcttgcttacttgcttaaatggcctgcagccggcatagtggctataccgcggtttaattatttaattatttaattggttgattgtttacttggttaaagggtggctacgcaatggccgcctaatttagggtaacgtaattcccggccgagctgcgcagcccagaacacatacagtcatgtttcatgagtatttgcaccctagtacttcgggggggggccctattttctgccggaaaaacttcgtactcactcccagccagtcgcactatgcgggtggctcctataataataggaataggcaggcggtattcacagagcggtcaatggtagaggtaccggggtacaaatactcatgcaacgccactgtagacaacatcaataacaagcatctttaccaccaccaagctttttccataacagattggtagcatgtccaggccttgacatacccgcgcaagatgccgacattctacagctagtcccatgggcggcaatgtacggtatcattgactctttcgggaatgaaaatgtccgccgacgcaagcgcgcgcgccgagagaaggagcgccatgataattctatatctaatacacacattccgtcctggagaagggtcgccatatcgaagcccctctctggcccgctacaaaatacagagctgcgcttccgtatcagtcagattgacagtgccccagacgttgtcggtcctgttatatccctcctgctggcagtagaggccttgtttcagaacgtcggtggctctaggaggctggaacgtattgcctctctaggccacgccggcctcgtcgacttccgcgcgcgtttcgtcgagggagacccccgcgttacccgcgctatgcgtgaggggctcggcacctcactgaacgccatccgcgacgccatagcatttgctgagggcctgctgctagttgaccgatgcattgagatggtaaaggatgatgccgtaaggcttgaggtcgaagccatagcatccatgatgcgacctccaccggaaactcctttgcacgaaggccacttgatttctaactgaggctgccgaggacggcagcaccctttccgaagggggcacatgtgagagagcatattacatagcttacataagctctagttggttacacctagagcgtagacaacatcaacaagcatctttatcaccaccaagctttttccataacaatcaataacgcctgtgtgcggatcgggaggtttaccagagaggccgtgaatggttcaaaacaattggcaagcgagttcggaagtcacttttcccacggagaaaggatagaacaagagattcaacttcttatgagaatgccactatggtttagctctcgctaagtttgctgttatcattaccattcttcgacactttcgcggctttttgaccacattctgggattgtctcttgcttgatttcgtggctttctccgtgagtgagacctgtatcctatgttctgtggctaaatatactgtgcttacatttgatgcacgtagttggtcttgagatgcttcgcctcccttcctccgaggaagtttatacgggcatgtcacgaccagagccgggaaaaccccggataagcacatcaattctcgaatgtgataacccttggctgtctataactccaagagtatataatttgttacactcgaggtaactatgggtaactgaggttattaatagagctcgaatcctctaatccccatctggatccgccatctaagacatataaaattagtgggaaaaaaaagaggaaaactctcatcttatgtagaaccgtacagaataccattaaatgaatattttcaaattttacctcgagcaccactgtcattgatacgctcacaccgtaagaggaacggaggcgcttctctcctgtatccggggacaggtccctgacgctaaacctctttgggagccgaagttccacaagccatggggaactagtatacggtacgaagagaaccgtattgtaaagtacacttagtattgaacacccgcaatgaagtacattactgtacagatatgaatgtaatataacagaccctgacccccatcgtggctttgagattgtgatgaaactgtggttgcccgatttccccttcccccccgttttcctctggttgagaccttatcctccttaccacttcgtcactctttgtcttccactttcccacactctttacagtcgctctttagcccacacgttcttttactctagactcgctgtgcgatcttgaatccaatcccttatccaatttccaatttgtgatttcgatctccgacctctaatctttcaccatgctcttcaacaagtctatcttcgccgtggccattgtggctttggctaatgttgtgactgccaccaccgtgcaaaccccggcctgtgttctcaagatcatcgggtatgtcccgaaggaatggaaggaatgctagtggagtcctgagctgatgacatctagcaaccaagccaacccggccgattcgaagactatctgcggctcgagcgctagcaagatccagtctgatatttccaagaactgtgccgatagccaggcttccctgaaattcttcgtcaacaactgcgccctgctcggccacaaagttggtaaggatcgacacatccaagagcatgttgcactatatcactgaatcggttacttattatcttctctttagtggctgatgtttccaccactactggcacctctgatatctctactgccaccggcactgctgggggctctacagccaccggcttcgtcaccgctgtctcctctgtctctgctaccaagactggtgcttccgttgctactggcactgcctccaaccctgctactggtaccttggcgatcagcactggcaccgcctccgagtctggtgtcgtcgcgtccgcttctccgactttcaacgccgctgcgtccgaccgccacttctccgccaccagctttgttgccgtggtgttcctcggcgctgctgctttgctgtaagaattcagcattaactgacagcggctcaacgtgaatatcgatgtgagcatattattagccttaattttgctcctttcgatctgaattgaatcgttgttcagggatcttgttcgaattctgatatgttgctcgtctatgtcaatatttgaactccgtgaacttttatcttcttacttgccaaaatcgcattgatttatgtgctattcacttccccagaacaattcttgaaaccgccgaggtctgctcaattgccaatcagtcggtcgatgtaaacagattcaaatgaatcagtgaccaaaatgccaggacattccctaatagaagagaacgagcaatacggagtacatccgaagtactcctgcggtcatccccgcacctcttggccccttgattaaaaggacgatgtagatctatcacattgacgtgtacaatgcggcaaggctccaaggttgggatcgggcatgatgttgactaagacatatggataaatatcacgctgtcaaaaatcacctcaatttcgtaatgacgtttaaagatcatctgagccggaatgcttcaggccgctcggcgacagctcttccgttgccatgttgccatgcgcgatccttcgcgtgttcacgtgaccattcgcgatctgcagtttggctgcaaacctaatctcaccgcctattctctagtcacaccgccttccctattctaactagaaaccccacgctaaggccattcggatcaagacgctaactgcaaatggtataaatggatgtttctgcctggcaggatgcaggtttgcaaggaaaggtggacccgatcttggtaagctgaaaaaacgcgggcaacgcgaaaagacaacgcgtccactcggcaaccaaagattcctctgcccctctgatctctttcttcttctcacacccctctacgggcttcatacattcatctttccccctttctctatattctaatagcatctcaatcctcctactactttgactttgataccctgttctcgtctttctattatttcaactaccaacttatcactattcaaaatgtttgtctacaagagaggtaagtgcatatatggtcttctgatacacggaagcattcgtggcaagagatagcttctgctccttcatctcgccacagctacctggctttgccacgccactgtttttggatcgacggctaacgcggatacaaactgcagatggacgcaaggaacgcgtgcagttcgacaagatcaccgcacgtgtctcgaggctctgttatggcctcgaccccgagcacgttgatgccgcagccatcacccagaaggtcatctctggtgtctaccagggtgttggcaccgtggagctggacaacttggtatgttcacttgcttgccccgacttatggcattatgttaatgtttcaatcctaggctgctgagactgctgcatacatgaccgttacacaccccgactacgctattctggctgcacgtatcgccgtttccaacctccacaagcaaacaaaaaagcaattctccatggtcatctccgatctctaccattatgtcaaccccaaaaacaataagcccgctcctatgatctcagatgaacactacgagatcgttatgaagcatgccgaggagctcaactcggctattgtgtacgaccgtgacttcaactacaactacttcggatttaagaccctcgagcggtcataccttcttcggattaacggcaatgttgctgagcgtcctcagcacttgctgatgcgtgttgctgtcggaattcacggcgaggacattgagaaggccattgagacataccacttgatgtcccaaaagtacttcactcacgcctcccccactctgttcaatgccgctactccccaaccccagctcgcatcttgcttcctggttgacgtgagcgcagacagcattgagggtatttatgatactctcaagacctgtgccatgatctccaagaccgctggtggtatcggtctcaatgtccaccgcattcgcgctaccggttcttacattgctggaaccaacggctcctccaacggtattgttcctatgctgcgtgtgtttaacaacaccgcacgttatgtggaccagggtggtaacaagcgccccggtgcctttgccatctacctggagccgtggcacgccgatgtcttcgagttcctcgatctgcgcaagaatcacggtaaggaggaggttcgcgctcgtgaccttttctacgctctgtggacccccgatctcttcatgaagcgcgtcgaggccaacggtgactggacgctcttctgccccaatgaggcccctggcctagctgatgtctacggtgatgagttcgaggctctctacgccaagtacgagcaggagggccgtggccgcaagaccatcaaggctcagaagctctggtacgccattctcgaggcccagactgagactggtaaccccttcatgctctacaaggatgcttgcaacaagaagagtaaccagaagaacctgggtactattcgcagctctaacctgtgcactgagattatcgagtacagtgcccctgatgaggtggctgtttgcaacctggcttctctcgccctccccacctatgtcgactctgcgcgaggcgagtatgacttcggcaagctccacgaggtcgtccaggttctcgtgcacaatctgaacaagatcattgatatcaactactaccccgttcctgaggcgaagaagagcaacttccgtcaccgccccatcgctctcggtgtcaacggtcttgctgatgctttcctggctctgcgtctgccgttcgactctcccgaggccagacaactcaacatccagatcttcgagaccatctaccacggtgccttgactgcttccgccgagattgccaagaagctgggtccctatgagacttaccctggctctcccgtctcgcagggcatcctgcagtacgacatgtgggaccgcacccctaccgatctctgggactgggcctccctgaaggccaagattgccgagactggtgtccgcaacagtctgttggttgcccccatgcctactgccagtaccagtcaaattctgggcttcaatgagtgcttcgagccttacacctcgaacatctactcccgccgtgttctggctggtgagttccagatcgtcaacccttggctcctgaaggatctggtcgacctcggcctgtggtccgacaacatgaagaaccgtatcatcgccgatggcggctccgtccagaacatccctaacatccccgccgatatcaaggccctgtacaagaccgtttgggagatctcccagcgcaacattctacagatggccgccgatcgcggtgccttcatcgatcagtcgcagtccctcaacatccacttgaaggagcccaccatgggcaagctgaccagcatgcacttcgccggctggaagatgggtttgaagaccggcatgtactacctgcgtaccatggccgcctccgcccccatccagttcaccgttgatcaggagcagctcctggtcgaggacaccaacatcgctcgctctaagaagcgtactggtgccgccggtgcctctgtctactcggctattccccgtaccaatggtgctgagcccgctatcgccaaggccgtcgcccctgtcgaggaaacccctcgcagtgtggctgcacctgctgttcctgctcctactgccgtggagaccgatgaagttgctgaagctgagcctgaagatgccgaaagtagggcaaaggagggcgatatattctcagatgcggttcttcagtgcagcatcgagaacaaggatgcctgcatcatgtgccagggttaagctttctttccctttaatgcttttggatgtttccttggggctttgtatatggccatgtcttctttcctggcttctcacgtgtactcattatgattttgatggacttttctttttctttgcgtgtttcggcgtcggttcaagatatttcctggattttcttattattacttcaataacgtgttagttatgttcttcattcttctttgtaaactttagtacggagtaggccaagtagatattccttgttgtacaggactagtctcagccttgtatattcaaaccctattatctcattcctaattttaaattgcttaaacttggctgattatttgagtagagctgtgaaagtagaactctcaaatgtcgtttggatgtctaccttgaggcaaagaagagatgatcgagtacctactattggtaacttacttgcaagaatccagccttattgtatataccatacgatttgtcccactataaactgtttatagttatatttacaagcaaggctatagagaacaacaactatgctatcttcaacccattgagtaaacacatatcaacactcccgcccattagatgatctatcttcgtataggccataacatagccgtatcacaacgcataccacccgcgcttcctttcaccgatatggccggtgaggtaactcagcaagatgaggggtcaagctccctccatgcacctctttaggcggtgatggcgggacattatgaaccacccaagggtgtattgtttccggagatatcgttttgccattggagtttcgtatcttaaagtagagcagcacacccaaaatgcatagtatcgggagaccaactccgattccgattccgattgcgatcttttcggtcatggctaactgggatgtttggccagaggctgagatcgacagagacgataaggatgacgatgacggtgaggaggagagcttgatggtcgtatgtggcgtatttgtcgacgcggacgcagatgcagatgtggatgttgttgaagacgcagtagtgctggtagtggcgacaggctcggtgacgttgaagtatgtggaaacaaatccacccttctcatctgggttgatccagagaaagaagacgtttgagtacgacagatcaaatccgtacacctgaacaacccacgtgaagttggtgacatagtcggtggaatgtattttggctagaagacgtgtcaatcaatcatcccgtattttgcagccttgggagtaagtaagtgtcgggaaactaacagaaaatatttccctggctggcggcacctgtctctaccaagctttgctgccagatagagacgttgaatacctcaagcgtggtcttccatgagacaactagcttgtcacctagtgtgaagactggattcacgccagtgttggaggctggatttgtgaaataattgtaatcgtcacctccagccacgagagaagcgacacctgcgaggagcaatatgagaaatctgggatgacgcatgacgaagcgagccacaaggtcaagtctgagaatcgatggggacccgggaattggcggttatagttgatgatatatgagtctcgcgctggtgggctggggggggnnnnnnnnnnnnnnnnnnnnnnnnnnnnnnnnnnnnnnnnnnnnnnnnnnnnnnnnnnnnnnnnnnnnnnnnnnnnnnnnnnnnnnnnnnnnnnnnnnnnnnnnnnnnnnnnnnnnnnnnnnnnnnnnnnnnnnnnnnnnnnnnnnnnnnnnnggggggaatcgaatcatactgaaaaacacacggtccccccagccagagcaggggtgtagatattatgaagaggctaacatgtctctgcattcatctcgtatcgtcgaacggtgagttggttgttttttaagcgccctgagggcaccgggtcgaatttgtgggcaggggctaaggcaagaggccgatgaacggtgcaataagatcccactgattgtttgagtcaagttggatctaactgtatctgtgatcgactcacgctaaagtgacggagaaggcacccgatcagtctatcacggcaaggatagctcggaagattacgattccgaatcgagaatgattgtgaaaacagtaccatgtggatggtacggagtagatggcttctgatgaacaccattaaaactgcctaaaggtattggagtgggccacagtgggctttgggtgccaattcataaaaacctggtgatggtgccagaattagaataggataacgtactttgtttccagctagacgctcagaaacgccaccttgttacatctgatgccccttgggctgaatttcgaaatattccatccttttgttcgtacacggaggagcatactctaagaatgattcccaaatacgtatttagtgccagattgcagagaattcaaaatccacagtctatttcgtacagagtaatgcgttgctattcagtttctctcccattgactagtttctgtgcttagggaggtaaacagcccccttttccattgtgatatccccaggcataacatccaacacatccacatcgtcccacgttgcatgaaccgtccgttcccccttcaagatccggttaatattaagcatcgtgctatacttcaccccccagctaaaaaagccctctccatccccagtctcctcatggatatccgaagacttcgctctcgaccccgcctgatggaagccacccgtaatcgccgggtaaggcgcgaaacaccgcaaatagccattaccacacatgcgtccgagcgagacgtcaaactgcgcaccaatgtcaatttcttccgcaagaccagacgggtttaccgacagcgacgcgaggatccgctgcgcaccgcggtagctcacagcatagaacattgagcaggcggcgtcgcttgccgtgcacgtcagtcgactgtggtctggtctttcgtggtcctcgaagaccggggggtcgcgccacagggggagaaagcgatgcggcattgggatggtcgggtcattcggggtgaggtagaagggcaggtcggttttgcatgacacgccgcagtggcctagccataggatgtcccagtcgtcgccgtatggtgaccgagtcgggagtttccggttatgtcggagttggagctggagggttcggactgcgtgggcgaagctctggagctgtgctttgatggagacgtcccagtcgacgtcgtcttccatgatgatcgcgcttgctagtctttcctggacaatcctaggggatcattaggcgtagtcaaatattgcagtgtcaactacataccgctggagtccgttgatatgcgcccgtcgagctgcgtactcggttggtttatggccatagtcccagttctgaaacagtcagtcatcgtgcgtagtgtgtaactctagaaagcatacatatggatatgatttagcatctatttcatctggagtcacgccgtcgatccactcgacgtggaaattgctgagagatgagcctaggacgatgttgtcccgcttgtcaggccggctgacaaggttgatggcgaagactttttggaactaaatagtcgtgagccgaggtatcattaggtgcagctcgaagtgggataatcacccccagggtttcgtttctgatggcatcgaagatatcccaatcatgatagttgctccagacctgctgggtaggggcgggcggtctgtgaatgctcgcttgtaggttgagaagaatgaaagcgactccaaacacgaccagaacgagctgtacgaagcgtagtcggaatgcagaaaagaccatgctcgatcgtcatcgggagacaagataggacgcgttgaatatcccgagcgtgatggaggcgaccgtgatttctgttttcccccagagccgccgaaggtgaatatgtgggctggttatcgacaggggagggagagactagcccttctaatacataaggcgtattgccgaagcatggttggtcgagatattcgttggatccccactgtgatggacttgactagccgcatgaactcgggatttgagggcacatgagtggtatacaaagcgacagtggcgtaccccggtccatgcgctggcagcattattagtactaaatacggagtagacgttaagaatgattgacatggagagcaccgatttaccctgatggccgcgtgggtccaatgatcggcccagaattaccgctggcccccgctgcggcaaagggtcaaattcgatgatgcttagtaatacatatatattttcaccgccggagtttccgtcttgaatattttaaaagtcacctgatctatcaccatgaagcaatttaaattaatccaactaccaccaataatagagataatttgattccgaaaaacctagttgaataccgcctaacggagggactttaattgctcaaatgcgaccgatatttagtcctagtgatagcccaattgcttcgagaggtagtggatcaggtgacatggatattacggtcgcagatcaggtgatctctaaatagttgactagttagatcaggtcaattaaatctacggagtaagcctccccccaacctagcttatccacgttgtatacatgtacgttgctttttggtgaaaccgagtacatattgttgttccatcaacgaagattctacgattcgcgtggcagaaagaaaccgccctgcaggtgcgaatcgacggatttgtaatcatgcaaagtgcccaggtgcaactagccctaacgcccaagcgcgcaaaacgggccacgaaaaggaggctgacacctatattgtaggcagcacctttattttatgaacgagaaaggaatagattcaaaacgtatttcaatatgactctcgggcagcacgccatacgtaatccgccgtcactgcggagtacagctgcagttctactccgcacctcaaattcttcaagtctccagtttcattgccatacggagtatgccgtctaacaatcctattccggggatgtcttcggtcgagtggagcagaggggactggacaaagtggaatggaatagtacggagtatggatgccaaccaaatctccgagttcataccgttggtgccacagggtctaggtccatggttgggcctggaatgtacacggaacaggtattggatgtgtagtcagaactctaggtcattttgattgctcatggtaacatagtcagcaccctgatcgggttgttggtattgattatgcaggttctgttggacaatacaagattattgccctgtgccctgattagggctgagctggaagtgagtctagacaagatcgatagctagagccaagtccatgtattcacacaataatctaagatcggcactattctctcactaaaaactaaaactcgaaagcccagaccagcagtggaggattccaggttaaaggattagattacgtgtataagaatggtatgcaaatgaaatctgccccagtctcagctcagctttgtctcacgcattgtccaatcgaatcggtattggcgcccccgggtcaatacaatacacgtcagactgttaaaaggctgcagtacatgtgtattctgaccagtcctccctggggtgcattgcgaccgtggaaatcaggatacacgtcattttcaaggcgaccgaagagatctgaataataacctttgtgaatccgcaccgtggaagagagcggatatggtatccccctaagaaacttcggaagaaacttagaaaagaaagaaaacgggtgctgtctctgattggcccagtagtcaggtacgagaggcaaaatatgtgggtcgtctgaccccagtaggcagtaggctcgtagcatcggttgaaacagccgtcggtctatccccagaggagattagggccaggagaaaaatggcttatgtggcgcacaagcccctcgtctctggttttcgttccaatgaggatctaccggggcatccggctcgggtactagggaagttagaattgtgatactgtcctccgtcctccgtgtgtagtgtccgatgcaggatatgaggacgacggagaagaatgaaagaaagtgagttgtccatggtacgatcgtggcttgatttggaccatgggttcaggcgataggtgggtccgctagtaacctttgaggtgggccagttttcctctttggtgccctaccgggggcattttataaagtcgagacccttccccccgttttctttcttccttcagtccattccttccttcccgctcactcacgttcctttcgagtgcccgaatcttcctgctgtgcagttgaatcaatcctttaaacaacttcacacaatacactccctcgagtctcttccttcacaatggctcctatcaccaagactctcgccctcgctggcgctttcttcgccttgactggctactcggctcccgtcgccaaacgcgccgtcgtttgggagaccgtcaccgatgtcgtttggaccaccatcgatgtgaccaccaccatctaccctcagtccactaccagtgctgtcgtgcctgtggttgccaccgccgtccctaccactaccgctgttcctgctcctgttgttgtagcgtccaccaaagagcaggaggctgcacccgttaccacctcgaccacctcctccgtcgctaccaccactgctgccgctgttcctactgtggcccctgtcaaggaggaggctgcgcccaccacctcgtccaccacctcgtccaccactactgctgccgttgtccctaccgttgaggccagtgttcaggaggctgcaccaaccaccacctcctccactgtcccgactaccactgccgctccccttgctatcaccctggaggccgatgcttactccgctcccactaccactgcagcggctgagacatcttccaccgctgcctctactgctacccgtgctgccagcgtcgatgttagcagcagcggcggtgcttgctctgaaggctccccttgcgacggtgacatcaccttctacgacactgccaccacttccaccaaccccagctcctgcggcaccaccaacgatggtaccgtcgagaacgttctcgccctgcctcacggtatcatgaccgacagcgactgcggcaagaccgtcaccatcacatacaatggccagaccgctaccggtactgtggtcgacaagtgcatgggttgcgacaacaactccgtcgatctgtcccgtcacttcttcggcgagctggcccccatggacaagggccgtgtctccggtgccaagtggtacatcaactaaacgttgcgtcgaccgcgcgttggtgttgatggccaccattatgaatatgaacaatggacacatctctggtagattgcgcacacggatatggtcttgacgactcttccttttttttcccccttcttctcacttcactgtgatcttttttccccttctttcccggtctctccgagaatcaatcattcatcactcggagagactgggcctttttacctttcgtccactctcttgaccctggatctttttttacgatttcatgtgtccctagtggaccgcattcatattttccccattttcatgttcatagaatcttcttctcttcggagtcttcttgtgcaataccaccctatgatggaccccattcggccatatcacatatccttacgatccctgcgcgcatgctggcaagtcatggacggtttgattctcttgacgagacctcgaacatgcacatgcgacaggcaatgatgattacgatgatcacgctcgtgaaacaaaaaaaaggcatattgcaggagacggatcattgaatgaaacttgtttcgtttgactcgtgtttgctttactgcgtattcgtagtttccaggtatcatttggggagctgtattccgtattgcccctttccacttttgagactcccaaaacggaaatgagctagttatagcaatgcaaggctagtgactatcattacgggtccatgctaagacaacttctcatcacttctagtttgggatgttcaattgcgggcctctctgtccagccaagtgaggctatgcgtatagatatcgtctcaaatttggatctgctgagaagtgccggcgatctctctcctgtctatgatttagccctgagcctcgtcaacgactagcgatcataaagcccagcccaatcgaacattacatcgttcctcggcgttctaataacaacatcaatctgtgacttatgcgacgaaagactagcgctgacaccgaaaacaagtcagctcaaccaatttcaaacaaacaaacgaaacgagacgaaactcaccgctaggcgtccctgtcataataacacttcccttctgtaccctgcgcaagatacggatacgcgcagtcaagacaaaatatccgcaacatactcttctcgtctaatctccccatgcacactcgtcttcggcggtagcttactaggggcagatatctcgtcgcagtaacaagacacggtcccagcggcgcaaatatatcaaaccaacaattctataaaactgtaaaatggcatttattgacttcgtaagatcatctgcctgtcaacttaaacaagcagcagcagcagcagcagcaacatcatcataatctataaaacaactaaacaacagccatccacccacaatccccagatcaagccggtacatatggcttatcactcctaacaatataaacctccccagcgagaaccgcacacccaaccaccatcgaaatagcaataataggaagattcacacgggcaaattccaaactcccaacacggatatgcttcctcgccaaaatatcccgccacagcagcccagccagcgacgcactaaacgcagtactgaaagcaccataattgacaccgagtgccatgctgtaaacggtagcccaccatgtgcgatcgctgatagggattccgctggcttcgtggatcttctgccatgcctggatgacgcgcgagaggaggatcgtggtgccgatatttgttccggcgaactggatgattagaagatgacgagttagcggaagaaaaagaggctaagtctattttctgttgtcccaatccttacattgcacagaatcacagataggaagcccattccaccgatactgccgattgtcccggtcttttcgacccagtggtcccagccgtacgcgaaaacaggcacccagcccttggtgacgagcgcctgtaccaggatgaacatcgtgaacgcgaagggtactagtgcgaatggcatgtgggagactacgactgtcgtcgtggggaatgtctcctgagaccatttgtagagatcggtagcgagtgataccaggctgcatggggcgctgtcttggtgatatggatatcctgggttctcctcgtatatcgttgattcggtggtttgtggcgagtccagtgtctgggtatatcccggtttcccattgtaaatcgtcgagtcggtggtttgtcgcgagtccagtgcctgaggagaacttgcacgagctagttgtttgctgtccatcgcaacaccgcctggtagctgtagttctgggaacttttccttgtcaacgggcacagagactgacaagggcgttccgcattctggatcgaaatccttcgaggcgatatcactatcggtgctctttagcgagatgtcgtagtctgtatgctcactgcggtggtgcaggcctgatgcatcatattgatccgcctggtccgatgtcaacgtccctggatccatcttttccggcagcgctatgcgttcgcgcatttctcgctctgtccgtgcttgctcaacctcccgtcgacccttcgcggaaatctcacgggtttcttggcgatggagccagccgaagacgagatcccagcagaacatgacgaaagcagcgggtaatgtgacccagaaaacgggatgttctttgcctgatgcattgattgccaggagggtgataagcgtggtggccataatcaaacccccaaaagatgcacccttcctatctaagaatgggttcatgatctcttctagtgagagttgctttccctccttatcatcagcttcctctttctcctcggcggttcctctggcatgagggatgttgggattcacaggtgcttttttcttttggtcctcggacagctcgtgcattgtgatagagagaggaatgagggattcgtctgcgaaaatgatatatagcaggaacgggaacaggataatcgccgtgacgactacgggaacgatcatgttggccgtgtagacgatgaacttgatcttgaaagcgccggcaaggaccaggttggtggggttcgaggagacgagaatcgcagaggcgatgttggctacggcgaactggctgtggatccaggctcgggggtggacgatattgctggatacgcgggtcatgtatgcgaggaacgccgtgccggataggatgatcgggtcgtttccgatgaagctgcctagtccgaaaaagaaaaggaacaggtagaagaagagtcggtggccgaccttgcctgctttttggaggaccttgaaggccaggtatctgatgaggccggaggcgtcaatcgagatggcaatgtaggcgagtgtgaggaagaagaccatgatatcaatgggattgatgttgtctgcgccgactattccatcgtgtacctcttttcggccgattgccagaatcgcgagaaggaataggtccgctgttaaaggtgccgtgatgaagttcaatggaaagcagagtttcacgaaaatgggttgcttttgattgtatcgagggcgagtccggtgtggtattatgcgtatgacacttaataggtccagaatcccgtttgtgagccatcgaggcacgtatatagggatgtgaaatgggaaaaggacaattatatctgcatcgcaagaaacaaaagtaagtcttcgtctcacatcaggcctaaccagacttactagttataacaaaaataattagggtgatgattgatcgccaacttttgatttccgaagtatccagttcgtcgtccattttgaatgtttgcttctttttctgagattcacttcaagaatataatagctgtggtcgtgtcagcccctctatcgtacttccgccgtagtcaagtcatggtgacaaaataccagaatgcggaacaggagaaagttgcgtagcgagatccaatccttgcttttattgcagacgcatttctcttttgcaaaaagaaaatccgaaataacgcgacaaatatgacgatcttacttggttcctgttggagaaattttgtctgcgagttgctctccatccatatgcttgaatgcaagggaaaccaagaaattttcaaaatgcagagaaaccaagtgcactgcccctcataatcacatggacaagctcagatgattgtgacttgggccgcggagaggtgagcgccctgctaatgaagggctgaataataatatctctgtgctacgagtgggtttatggatggataaattaaggttatactagaagctgggcgagtttttttaatattgatatcataatgtgatagtgggatggacaggaaagaaacttccgccgggtctgaggacctgatgtctaagcctcaacgaaaagatcaatcaggaaatagtacgacatgcacgggacatagagaacattctgattagcttagattagctctgggcaaaagtgccaataacaagattcgaggctattggagactggcgaaactgggaaaccccgcactctgccactttgggaagttgtccgtgcgttgatgttagctttaacgttggccgacccatggttcggtcaatatcagacccagtcttttttgggggttctcgtgagttgaatcattcaatatttcctacttttcctacgttatcgctccagttgctcgtgaggacctcggtaaatgcataaatgcttacaacacaacacatacaccgcatgatatgtacgacaggccctaacgtgccaatcagcgggagctgatctcgccacatctcgtattccgcccgggtttttgcgcccgcccaagtcaatatcatggggcacttatcgtttcgagggttaggcattgatcataaaggttcttcctgggtctatccaatcccagctagatcgaggctccaaaccccgaaatgaggctgttgctgacgaaatagctgcatgctctgttggtcatggtcaatccacggagtagcgcttcgaggataagacggcctggagactccttgctttactttcctcttctttcttatgatatcccggcgagcttcattaagtcactgccagaaatagagaacaacacattaatatatgatttttttgctgctttatcccgaagttaccgttaccggaggcggataacatccaatgccagcaatcccaattgttacctccttcctagagcaagttctcgtgcatcgtgctactgcaccgccccctaacgtgacagtgtctgcaacttccgcatcactccaggtggtttgcgcctggccaatatcaggccaatatggaccggggacccgagtcctgtgggttttccgataatggtgttaccatgatatactaacatttactccagatactatgtcttgattgcagcctgcgtggtcgctcgcaaagtagaatggattcggaacgcttgtctagccgctgtgttgcttttccccgctatcgccgctcttcacgggattgtgcttgctgcgcttcatgttgacggtgagtctaatgaaactttgccccgggtttcctcctggtgtgacccaatctgatactatataggcgctgtcgatatggatgtatatggagcattccagctatgcgcaattggaatcttaaccgccccagcgaccgtcaggctttcccggacctacttcaacaaccccggccgcaatatcatctttctatggacagtccttctcctggctgggctagtaagcttgattgtggaattcatgcgcctcaagcccactacttgcccggatgacgacccagcaagcattttctgggcctcaactgggggcaaaaagggcggtgtgtttaagtatgactctaactgtagccttgcttgtaccccggagaatgggccagtctcaccgttgcgacttgatgcagccaacaatatatacgtgattccagtcccccacgagctgacgttcaatgctactacgctaattgcggctgcatgctgcatccctgccatcctgtcgttaatatttatgtggatcaaaatcttggacgacaattgggagaagttctcaaatggaagacagaagcagaagccagatgatttcattctgggaaccaacggagctaccatcaaccacatgactgggatcaccgacaggataagcaaatggctatctctcatcgagataccggtgtttgctgcagcagtgctggcaatcctcgtcaaaggcgagatgaatttttggagtaagcaaatgaggtaccaaacagagcctatacaaagcattggtaagtggatgttgcacctcgcctggttttggcggttggaaataaacttactaaaagaaatcgttaggtcaatgggcgccaatcgttggtacagtactcgctgtattgggatcactatatatgctcctttctgcggatatggaagccgcgggacaagaagatgaccaacaagaagagattatcgttggaaaatccccaaactacgacagcactgtttcatacgccggaagcagttccgcgcaagattctagaacaagtgccgagagacaggactcggatatcgaaatgacaactatacgccgccctactaccaatcaaaccaccaccactcaatcccagcacgacttaggaagacgaaaggtcgcccgcttctttaatgcagcaagcgccatcatgaccgccaaagcccacaatcaaatcaagaagacgggtttcaatcccgaagcaaaaacaaattaccccgagatcccaggagaaatatacagaaactcatatctccctgatcataaagcccattaccaaaggtcatctacacccgataaccgatcaagagctgaaagtttcacaagtcgcaggaactctgtggataatggcgaaggcagctctgggccccggagtacaacacgtcattctgtgcctgctccagctgtctcgcggccaaaatcacgccaagctcactcaaattcgctcccgggtggggggttatttgagacatcgaccctgcagtgtcctccagccacacttggagggtggcagcgacaattgagtcccttcgatacaatgtcgatctcacgaagtagaacaccgtctatttccgaggtcagccccacaaattcatcgccgggacctcagttcctgccggagatagtagtttctgcccatgaaggtagttgattgttttgcatatggtgtactgatgctccggtactctaatggtgcgtggttatcttttctgttttattttcggaattctttatgatcccacgagttcattatgtctaggcttatacggtgtatattacagggtttcttcatacagcacattcatgataaagtgtcatcctctcatacctcaggcataatcacgtgataagcaatgtggtggagtggacccaccttcccctttaggaagtgtttgttcctatatatttcatagcaactccttcctcctaaccgacattccccccagtggctgagtgtgttgacacgcgtttaaaatgctaggttaggtactagctgtcagcgttcgacccacccagtgcacggtcataaatgttccaattacgctcccctaattggcccaccttgcttagtcgccggtcaggacctccagtaggtccggcaatgtgtgcgcaggtggggacgactagatcttagggtaaagatggttggggttacttaagcattatgatcccctaagtggcgacctgggagtataaccccaggcactggatgggaatgtcctttttttgccattttttcccctccttctacttttctctaaagtctgtctccaacaatttatgcctgcctttcctctcccccacaaagctcattgacgcttactacaggtatctatcatgagaacagagacaaggggaatacgcttggagggcaacattgtcaaaattagcgtcggtagttattactgtccagaattatatgtatcaactaccaaattatcagctataacccttcaaccctcaggctcctttctcccctcaagtctagcctgatgcgccatttttgagatcagagtcgccattccagcatgatggcagctggtgcgaggctccttttccggcaagatctcaccctcctgcccatcaagcttagagaagtccaaagactttggtttatcacagttatactgtgcattggcggcacgaagaaggcagatctcatttttcatgcagtcaccattgcagctctcaacttcgaatccgcgaacacgtctcgcccaataatcttggaaaaccgtgggatcgcgttccatcgcgacggtgacattgtgccagaaagctggactgatctcggcttgtggatccgtaagcggaggagagatcttggatccatagtctgccttcgcggagtaatagggcagccattctggctttgtctgaaaggacgggtcgctgatgttggcgatgtattgagtgtaatccaagacgccgaaagtgactggatcaatttcgtagacgcggaaagagggcgagccttccgttggcgttacggctggaatgatataacccattgcagtagctgtgttccagtctcggtcgttgtagtcggagtatgcgatctggaacccatcccggtgtgtatgaccatagaataatcccgcgatggtggcttcgtaacgctgcacaatttggtcgaagtaatccgaatggtcgcggaagtgatctggtataccggatggtatatgagagattagccatgcacgttggcccgcgtcctcggcagcctgcagttccttgatgagccattcaaattgtcctcgtgggtctttctccattggttcctggtacatatagaagttgaatacgtagtagaagatgctgttataagaaatgatgcgcagattgctgttgggatggacggctgagtacgacgcgaattgatccgcagatttgacagaagaaacacctgtgaggccataccaatcttctgcaagagccgagtacgcccatttgggatcagctttattcgaagcatccgtgggaaagaggttgagtggtgcagtgtcatgattccctattgcagcatacacagtgccaatgtccttttccattgcactgtacgtagcattgagcgctttcagagcttcggcctcgtcaaccaaccagatatcgtgggccaccacatcaccggtgtaaatggagaactccggattgatgtctgcgatagcagcatgcaagctctcctgaagtatttgtggtgcgtcacacttcgtatttccaaatggtccacatgggtaggctgtattctctggtgaatattcatccgaccaagatctgcaacagataggcttggaacacttgtagctagattcaggctcgtagaggaggtccacgtgtgtatcgctgaaatggacgaccttgagcggtgtcttgccgctaggtggtggcctcacagtctttggcttgggtgaagggaacgtcaaattataggaatgaacatcgggttgcttgcagagcccgaccagattagcgcatagtgtctttgaggcgtcagagttcagttgtaaatgtttgaaaacatcatgcagcgcagggccttctttcttgatgatcccggcgcagacatctgggtcctcgacctgtgcacttgcgattaatgggattgagtcagtaagctcacgagcatggccaacataccctgctgattttgcacaaccctgtgaatacgtcgatcatgaaattctcaccaagccctgcggcaactttgatgctgccgaggagaatctgtataattgcatagagtcagcaaaggagtcaatagaatggaagtgctaaacataagcatacttggcaagcaccgcagtcaactgtattcttgaagtcgtcccagatagaagcgacggactggtcgacttgagtctcggcttgtacgccccggagagacgccgaaaggccgaacgccagcagcaagaagttgagtctcatcttgacgaggagttggctagacgaaacggctgattggatgaagacaaacctcgaaagcagtcagggcacttcgtaccttcccagcattgatgtgaaactcctaggcagtcggcatcttaaatatcacgggccaagagcagctgggcaggcccttccgtactttgccaaatagaaggtgatcctacagctgcttgcttagattttattcggttcagacataaccttaggacaactttttatcatgtgatgagcagtagagtagtattcatatcccctccaggtcataaaaatagaccacggtctttttgtggcctagtggtaatacgctgtattatttcgagaaacgcagccaaggagctagcagatagtcccttgtaacgttgcgaagccgctgatctcaggggctgattatcatacgccattggggtatccttggcatgttcgcatactcgtgaacttgctcctaaataggagtcgcggtgttcaaacgaaaatttagtaccaaaatatagatgaacaaccagaagcttatctaaatgtagatatgcacaccaagttcatacggtaaaatccgatcgaatgcaccagtccaaccattgtacacgtcaggctcagcacttgcaggattcttagtaaataaattcttgaaatcttatgggtaggaggattggttcgaacggatacttgcaggtgttgatctggggtagaaaatcaatatccgggctcgggtctgctgcttgggcgtattaggaaggagcttcaacttttggcctgatgcatcacactaataattggcgaatagacagatcgctgtcgatcgcaaatccccaacccgtctgtctcacaacagaacttcctctgctgaatcccccagcgcgcagcctcgcagactcggccagattcaataaaatgactgccacgtgtatttcaagaactttgtgactccggaatgtggaatggctcatgtgcaggaaccataaattgcttatataggcgcggaccagcacagcccctgacagaatactcgcgcaggtatccatgcgaaaaaaatcatagtatcgtgtcagtctcacgggactctcgaatgggttgagtaagatattgttggttggttggatttcgtcatggattggggtcagctcgctttggtctgttgtgccatgttcattggatgagccagccatatgtggggattttcattaagaaacaatccctggacaagaatagtatttgcatgctgtgtatctgtgtatttgtgtagcattatagcctcatagatgtaccttgaaaataaaaagggacaaggagagaagtccaaggtgattggcgggccaaagccggggtaaaaggatctaattttctctctccccacattctttttgacgtgttgaccatcttttccttcaacccccttttcctttctatctcaacatctgtccaagtattttaatctctgttgttctccttcttctccccccgtcctccatattccggattcggactccgtcgggaaacgagacgatgacgcctccgtacacgcgccatttcagcacgcttacgatcacgatcttacaataaaatccgagagcttcaaccgtctgcactgttctgcgctacgtgtgattgttaaaaccggactgtccgttggggcagtccgccatcggccaaattcgtcatggagggtcgtcaacaagccacgctgggtgtttcgatcacccttttctccatcgccagtctatttgtcgcccttcgcttcatttcgcgtatatttgtggtcagaaagattgggttacacgactggttgatgttggtcgcatgggtaggatccctaggcttgatccctgcatgtacccggggatgtagcgagaatgcgctctattgggcacatgatcgaacctcgtgctggagctcggaggctaaccagtctgcagttcatcgattttggcttttccttctcgctattctacgccgttcggaagggtcttggcctccattcgagtgacattaagcctgaagatgaactcgcttttaatacggctaattatgcatttacggtcctctatgtgagttacaatgccattgttacttcccctgttaccccgcaggccaatactgaaataaatggcatgctgacgatatttcagaatcctgcgctaatggcggtcaagacgtcgatcctcgtcttcttcctgaccttgacacgcaatcaaaaagtattccgatgtgcaaactatgtcactctatttgtagtgaacgcagcgggctttgctttaacattggtcaatgtttttcaatgtcgtcctctcagcgcagtattcctttctgacatcccggcccatgcgagttgcaccgatattgtcaccctgtacctttcctcgtccccggtgaatattattacggatctcgcgatcctgttgcttccgatgccgcttttgacaacaatgcgcctaccttacaagcaaaagattattttggtggtcactttctcctttggtttctttgtggccgtggtcgatgtggttcgaattgcctttctccaacaggctgccatttctcgttcgctggaagtcaagtcaattcatatccaaaacatcgggggggttgatttcagttgtacgactcgctcatctccgtattccaaattaacgcgtcaattgggctaacgatgggatttcacagggtacgcgtcgctatctttcatgtggtctgtcgtcgaagtcaacatctcgataatctgcggttgtgtcccgagtctcaaacctctggtcactcgtcttgttccgaaattgattagagacactggtgacgagacatcaactgcttcgcctcatggactctctgcaggcccaacaggagaaagtcaggttgcagtgccacccccggctgcagtctcgggttcgccagaatttcaattgccattgccatttccatcgaataacaacggggataagggtctacggaaccaagttggtggtgtctccactgggcgacctagctcccgggactcggagcctatgggtataatggatttcctaggtatcccagaaacaggggccctcgatacagagggaggcaccaacacgagcgcatcttatgcaccggatatcacattcttcgattttgtcaacatgaagaatccggaaagtatgctaaagctgaacaacagagagtcgattacgccaattgcattgaccacactactattcttcctttggggtttcgcatacggcttgcttgatattctgaattctcaattcgagactatcgtcaatttaggtccttggcattccttgggtcttcatggcgcgtacttcggcggatacgtggttggccctctattggttggccgaccggtcttgaaaatatggggcttcaagtccacgttcatcactggactttgcatctatgcctgtggaaccctcatattttggccttccgctgttctgacgtcgacacctgcgttcattttgtcaaacttcattgtcgggtttgggctagcagttttggagactgcggcaaacccgttcattgcgctatgcggaccactcgagaattccgagatcagactcaacatttcgcagggtgtgcaagctattggaagcgtattatcgccgctcctagcgaaacgtgttctcttcaagaatgttcaggatgtcgcatccttggttgacgtacaatgggcatatcttggcattgctctgttcgatgtgctgttggcagtggcgttctattatctaccaatccccgaagcgtcagatgaagatttggaagaactagcaaatcgacgccgagaagacaatatgaccaaagtcatcggtattccggtcgtttggctgaccctcggcctgggagtctggtctcaattcttctacgtggctggacaagaagtcgttgcgacagctctccaacgttttgttcttgccgctcgtccagattcatcactcaaaccattcgatttcctgactattggacacagcattttcgccgtgggccgcttcttcgccgcgtttgcgcaatggttcctcaaaccacgatggattcttatggtcagctacatcggcatgatcgtctgctcaattctttgcatgaaaacaagcggcacgggggcaatcgtcatggtaatgctagtctacctattcgagagcggtgcattcagcattatctttgccatttccctccgcggcacagcccagcatacgaaaacagccgcagtcttcatgacagcggcaattggcggcggcacctttttcccgtttgccgagtacgcggcatacctcgcacacggcgggtcatactccttctgcgttatagtcgcgctcttctgcgccggtgccatcttccccatctacctcaacctcgtacccgccgtgaaaaagcaagtcgacccggttccgaacgagtatctccgccgacatcgccgccgacctcggacctcgatcgagaccgtgcatcgcgaaaagagcaatccttctcttggtggtgttctttcccatccgcgcagtctggcatcgaatccagatcacctaccggatcttctgcttccggaggagatgcacgaaaactcgcttgctcgcgatttttcaggggctaaatctagttttagctctacctcgcgtgccaagtcgaattcctctcgcaattctggttcaaagaaaaagttctctaccagaattgatgatttatgactgtcgctcaatatgcctaactgctgtttttgtctctttccttataccctaaacttcacgatacttgcgaacccctagataccctttcgcttttgctttttgggttttgtcacaatattatgtcatgtgtcttctctgtgcatatattgggcggcaatcctttttgctttttcgcagcatttcagcgatggtgttttgaccaaaagttattccttctctcttagcttatctggtttcattgcttaatgatattcgaagaatctcatgatcaaacttgacttctggctgggatcaattgcatatacctaatttggatctgattggttctcgaccatgagggttctcgtatggcccaccctatcaagatgtcgtgacccttgccaatcacccgcgggcaattgcagctcaggcagcactacctaccaagtctcgttccagccccttttgcaacctcattttagctttcgcctcaagtcggttcggggttgacccatctacggattttagatgtagtccacaaccttcgaattaaagaaatatttacaagtcgatacattctatatatttacacgtagcatcttaagctgcacgtagccgggcgtgttaaccaaaaaagggctgttttgggaacttgctcattaagcactagcatgaaaataggtagttctagatttattggctatgtactatatgaatctcctcgtacccataatgacatatatcattcttcaaccgagcgcagattccgtttagatgcaaagcagctgatacattgtttgctattcctatgcagcttggcagacggcaatctctttatccgccctgcagaaacgcggctcggcaaatctctctttgctcatcttgcggaagatgcttctctagaggatgtctatgtgtctttgtccacgaagctacatagagagctttatggcaatagctagatcatcattttccatccacttcatatcgtcatcattctggttgactattttgcttctcgtggtctttacctccatcgtcatcatatctgtgtgatgatctagctactgtcacaaagctctctatatagctctatgctataaaccaccaaattccatcctccagaaaccagaagaagcacctctatggcatttctttcacttgcggttgatcacttcttctctcgtagtctgcgccttgatcagattcccaatcctttctatgtaattttgcgtgggtcaagggtttatcttggagagtgcctttttagacggtttcatggtcaaaatatgtacctcactagtaattttaggtagtctgacaatgatgatttactgaaggtagcccatgaatgctactcacactgtcttctttggatcgccacagatctccaaatcgcgaactaggtcgagggtggaaataccagaggaatgtcaatcccggcattccccatactatttccctccttccctaacaattatttaattccccaacaaagaacaaggccaggctagaatacaggatagtacactcaaactgaaaccatgaccaaaaatcagagcctccgatgcaacaccgaaaaaggtgtgatctcggagatttaccttttgatagaagccagtcagattggattccggcggtggcaaggctagtggagcaagcgtcgaactaaaaagcctataagaaggttaaaagcctaggcacgccccagtctcagctacgccacgagatagttcacaaagcctcatctattagagctaataaagcgatgtgcctggagtaactacaatataagtaaatttctcgataaagtttcggagtagattaagttatgcttgcgatgctctatagatatcacgatcggttcttatatagtcagtccctaccgccgttaagattaggcctacgattaggcgtaagagctaatctggtccaaaactcaaagatgctctgaaagatacatgtaacaatcaagacacggacttattgcccgattcttccatgatattcagatcgagcgaaaaaaaagtcgcccccctcaaacgcgcacagccatccaacgggcagccaccagcggttgccgttcggattggatctggagagtccacagcggaacaagcgcaaaccagtggggttgcgagattcagcgatttttgaaacggcgattctgttcgtttggtacgattcccgacggggtttcttttttttttttggctgcactgggattggttgatttatacagaccgaaatgtagcctattctctattatactaaaccggacaggtgggatcggctttaagtttgaattccttttttttttctccacgtcgaaggcgcaatcgccccaatgtctggctctctgtatctcaactccgggatcattccggagcctcgggtgacttccgttgttctacagaccttgttggagagtgttgattctagttttcatatggattatatgtatagatgaattacgtatatatccatctacctatgcgatctagtaaaaccgaataggacaaagaaagctcccccccaatgatgaaactcgtaacacaagtcgcccgttactaaatgcgtattttgcgcagaagccagcacccatatcctaatgtacaggaacccgtattaataagaagaacccgctggacagaacaaatgaaataaacaagaaacaagatcgctagagatgaaaaaccaggagccagacagggctctggtggacgccaagtcgctgacccaatgtaaaaagacaagagtcgaaacaagaacagtcaacagtgctcgatgaacctcagctgcgcgcactccgcggcagtgagttctgcgaggacgagtcgtgcatgatatccggcgcccggggaccaaccatccagtcttccatagcgagccattcactccagctgcgctcggcggcctcgatctcggcgtccagggccccctgcaacggacgcaggaacggtatggtctccagcggggggatgtcgtagtcctttttcacggaggcccagccgccgctcttggctgcgaagaggtagttgcggcgctcttgctcgtgcatgggtcccacgccgctgccccagtcgtcgccgaagaagccgtgcagcacgccggggaagtccatgccggttgcgactaggcggcggatgtaagggatcaatgagatggggggtggccctgagggttgtgtgccgggtggggagggttggttggaaggggtcgaggttgagttgaagattgggtgaggttggcgctggaaggggagtcggatgtttaagaatgtggagagggcctggacgggggcgctgtgctgggcgtgatctaggaagtagcgttgacagctttgatagcggggataccattcaaagatatcggagttgtcgtctgaccctggcgaggcgtcggctaaaccaatcacaggggccgggtcaatttgtggatgggagctcatagatgggtgtggtgaaggtgagtccgaataggatgttgaggtcgaggtcgaggttgcagttggagctggagttgcagtttgtagtcctggaggatctacttgtctattccttttcccgatgctttgcttagttcgtgttctctctcttcttggtctgtttggggctgcgcctctttcccgaggtctgggaatccagtggggtcgaattgcggccccaagttgaaggaaccggaggggtaggtgggtgaaagatagattggggaatgattacttggaaaaaatatccctacctcgacgaactaggagagagactcgacgtcgtgaaggggaggttggggagggcggtgcagagcggaacagatccctgatggtcccgagtccgccacgagattggggcttgttgatggacatctgttagggaaccatctaggatgttcaggtgaggattgggggatgttcacggaatacccattggggatattatgtatgaagcaaaagaaccggagacatacatgtgaattccaatacctcaagaggcagagggagggaagtagaagaggaaccagacgggagaactgaagtaaattcagagagaaaaaaagatatcagaattgttctggaacgtccatagaagagaaacggggtctgtaggactaataagagacgcactcaacctctatacggagtatttctgaatcggatccatcgaggacgggtctatccggtcaggccaatcattctgagatctgcttaaccacgggtcgacggtggatatcgatctagggcaggttttgggaatttttatttgatatattaatatattacgcttatattacacctttaccacatacattcccgatacggaaggctctcaatcctggataactccctattttgtcacagatatcaattactttgcacgtctggcacgtcctattggcccggatccgggcatgctaataatacctgttcctataaaaggcgtccgggtacatgacatagctgcatcgaagcgtaactagatcaggctggatcagaaagggaaaaaaagggggccccttcaagaccgggacctcctggtatgtgctcaaccaatctcaacccgggctggtactcgctgcaaggcgcctagtcatgattgaaataatattagaccagagaacgcctgcctattccatgtcagcattgcctcagtattaagtggacgactagtcagagcatagcgttaaatagattgaaccctgcagggtagttcgtttcggtatcacttgacgcaataattgaatcaagaatcacactaagagtgacgttttgatagtgggtttcatatctaaatcaaacacagggagttgatctgtataccatgtacccctcctccctgccaagttcccacaaaccgggttcttcaacatcgcatgcagcacgcaagacccggaatccactttgttgttatcgaccccgatcttcgatccgggaacattccttattctgattgtatgcattgcaaggctacggagtacttcttccacctcaatccccatttgttcaggggccgcaatatgacacaagcttgcaaagtcagccccatattggcgtcactagagcacacgcgctaggatctacttaaaaaagggccagaacataggagagcaggggccactcatcgagctgtgagagtcagatccccctttagcggggaggtcaagctctgacccgatcgcgcctcccagataagaaatgacagagctgatctttaggggggttgaccatcccgtacggaatacggagcactccgtatggagtacggcgacctgctttatattgtctactgattaagaattcaaatcgcagtttgtgtgcgggcgagtttttgtaactccttttctggagtcgatatgggtcccttcagctgcacaaaatctggtggcgccgggccaggggttaagtaaagggcggaactatgtgcgtcgcattccccttttgcgctttctttttcgagattatactgtcggctatttcgattgggtcgagtttaatgtattcatcactgaccaattctaatattgtgaattctagccatccgatcaatctattctcactcacttccccgtggaattcgccacatgcggagctccaatctgatccactcgtttgccatttgacaggtgacggggcgattctttacaatatatgacatgtgtctctattgagctaggactgcagttcgagtcagccagtcggaatcacgaactggcaagaagtgtgatcacaaatcacagcctgagatgctcttgccaattcgatcatagtgcgcacgctgcacggtctcgccgatgtttatgcgaatatgcgaagaccacaatattctccaagacggtagtttggtatacccgctagtgatgacaacctattgccattcttgcggagcggagccaacccagaacagtgacacaactcggccgacgccattgagctgctagaggctatagcctgtctcaactcaagcgcgacgacaactagtacgcacgcagtatccacgctcagttccgcggatacccctgtaaaggttgcggagcgggtagatagattaaggggaatctcaagctgctgcccaatcaccacactaccataccctatgccaatggtataaagcatttgaaacaagccggtctgcatggatatgtgtcgttccaagacagagacagcatggtcgcatgaccaagccctctgcactgcagctagtgggtattcggataaagctccgcagcgagttggcgaccgggcttcgttgccaagagtgtacgagtactccatacagacagggttcccgccgaccgccctatgtactcgttatgtcagaagcgtcgaattatgccggtggtaagtaggtgtcacaacatcgcaacttgccacgcgcgatcagtgcatccttcgcacatgtgtcgtggcgaagaacatgtaccacaccaatcccaagatgggagaaaacggtgaacgttggacttgcaccccttcgcgacaagatcgccggcgtttatatatccatgcagggtcgaaaacggtatatcaacccacacccggcagccgacacgtgtcaccgcacatctctagcagatcaacatccccgacacgaataggaaaaacaatacttaaccagcaaacagcgcgaagatcatcgcattatctgatccatctcctctagttacctggccatccatgtccacttcgtacatgacatgacatgccgtgtaactcgtatccctctacgactttgcaatgctgcaagtgagcgatgaggatttctatagaccgtaactcaagttcttctaagttcgtgctagacatggataaccccaagccctccacaaacagggcttcgtaaatcctcgcttcaaaactccgtactccgtactccgctactttctttgtatgtaccccgcgaatagcgcgacagtggcgatctctaacccactcggccggcagaaacgaacgcagggccccagctgacgatctcgggtaaaccgtgtgtcatgggcgcacggtgtctccgatagggaaatattggacgaatgggaaatttgctactgtcatggactcgtgctggtgtgcgggatcgcttgttgcggagaacgccgttttcctggtctgggctagtctgggctgatctggggaaatgaaatgcatagttgatactcgtatactatccatagataacgtagatgtgcatatttttgaatggagtaggtgtgttgatgatgactgggatgggtctgatgggcttggatatcgtggtgtcgatgagttaagttagtgtcatgttagcgtggaagtgaggctcgtgttatttccacgtggcttggttgaaacgctgatgggtctgtactccgtatatagatcggtgttgaagcgctaggttggactatctttatacacactgtcccataaatatgtggttgttaactaaacccatgggtgaatttccggagatatatcctatggttattgtctgtttgaacggtaaatatatggtggaccatgctttggggtgtgcattgaccagatgaattcagccctggagattaatcatgttcatagcggagaatactttacgttgtacggagtatgtacatcattgaatagatattcaatatcagtcaagacaactttggaagcacagattcccattcgtcagatatcacgtcatggcaagtccggagcacaaggacgtccaattatagaatatttatgtcaaaaatccaagaatctctacaatagcaagcggcataagtgaaacatggagacgctagacaagctaagagatctacccgacgaactaaatgacccaacggtctccacgttgcaaccctctgcaagcacgttgtcgaacccacaagatccaacatccgaatctgcaagataagaacgcatatgcagacgctaagtaacgggaacagtccacagtcaaccctaagactagagagctctaacggagataagcttctggatctgcaacggaaatccactgggtcctgagggtcccaaggttgtcccacgggccacatgtggtcatgtgcgagtatgaattggaggtcgaccgaggcgaactctcgtgcgagtacggagtagttatagatcagatcaaaccacagggacctcgggagtaaaaaagacggagcatcccgtgtgagtgattctacatttggcttctcggtgaggattcctgtcgcaaccccaggaagcaacacgcagcctccgcaaatcgctatcaacaaggagtggagaggcgcgtctgagttttggcggagagctgtagcgggcacccgttcgattggtggaccgtggcatgatctaggatctagcaatgtgtaaaggatcaggatgttggcatttgtttcttcctttctatttattttatatttatttgcatcgtatgatcgttatcctcgtactctgtagaggcagtcgaatcctgcaatatatttccttaagattaggataatctagagctgatattaaaggtactccgaagtacgtccacggcagcgccgaccatcggggctccaatgcggttaaccgggtcttggcatcacacgggattggtgcctgacccacgggggaaaggacaaaccctggacagtccgagatgactattcgggggcgattgactggaccgggatttggtgcgggtattcgatattccatggatttggctactctgtgtatgtatgaatatgagcattctatatgttgtagcaacttttttgatctcattccgactagatttaggtctggaattacccctccacccctccatccctctacccctctacccctcagttcaactgatccagtggggcaaaggacgagccgtagggtgtagataaaggaaaaatgagtaaaaagtgttagaaagcaaagacgatcagataagctcggtaagctaaaagtggcaggccccgttttggggggccgctttgggtatagtggacacgtgacccagcctgcagccgagtgaaattgccgagttgagtggcggagacgagttttatttttttatttcttttattttacttttatttacttcattttcgattcaatccatagccatagggatattcatatgaggatagctcgaagatagctcgaagatactatgttggacttcctagtaactacgaaatgcacagtccacgcatgcattagaggttcagcctcctcacaaggttacattcacttcaattatattttttcacctctcggatcggtcctctccgagaatacggatcgcggaagagatattcacagacaaggaagatttaggaagaaaccacgggctatgattgatgggaagattcgaggtagtccaatgtgggcaagataagccaaattctgtgcaaattctgtgaccttaaaccataagataacattgttcgggccccgaacttcggacgtgcttcccacggaaaccactggaaaccattgggtttcatctttcgcttgggatcttctccttccaattcgtgcaacctggtcttctggcatggtcgtcgactgtaggctcatcgaccaactcccgtcccttttccccccatcgtccggaatctgtcgtccgactccggcttggagtctggctctccacatttctatatatttgtacaatcatccccttccctccttcttcctccatctactctccaaaatctcgattgtcttatactctgctcgtgggcaatttctaatatcataatcacatcagatcactgcctagcattgatctaccctacctaaaagcagagtaaccgagactaaaaacccgccgaaatgatccagaacctccccttcgagcctgagttcgagcaggcctacaagggtatgtctcttccctttcccttgtccacgccaatgccatatcacaatttttgcccggcttaattcctttaccgtcggcatcttcccggcgtgcggctccacaatttcggggtgactcagctaacattcccgaaacagagctcgcctccaccctcgagaactccactcttttcgagaagaagcccgagtaccgcaaggctctccaggtcgtctccgtccccgagcgcattatccagttccgcgttgtctgggaggatgatcaaggccaggtaagattcttgtcaaaagatattcgatcaattgccacattctaaccccccctccttcaggtccaaatcaaccgcggataccgtgtccagttcaactccgctctcggtccctacaagggtggcctccgcttccaccccaccgtgaacctttccatcctcaagttcctcggtttcgagcagatcttcaagaatgccctgaccggcctgaacatgggtggtggcaagggtggatccgacttcgaccccaagggcaagagcgacagcgagatccgccgcttctgtgtctccttcatgaccgagctgtgcaagcacatcggtgccgacaccgacgttcccgccggtgatatcggtgtcaccggccgcgaggttggcttcatgttcggccagtacaagaagatccgcaaccagtgggagggtgttctcaccggcaagggcggcagctggggtggttccctcatccgtcccgaggctaccggctacggtctcgtctactacgtcgaccacatgatcaagtacgcctccggtggtaaggagtccttcgccggcaagcgcgttgccgtctccggctccggaaacgtcgcccagtacgccgccctcaaggtcatcgagctcggcggctccgtcgtctccctctccgactcccagggtgccctcatcctcaacggtgaggagggctccttcaccgtcgaggagatcaacgccattgccgccatcaaggtcgagcgcaagcagatctccgagctcgccaccgtggccaccttcagctccaagttcaagtacattcccggtgcccgtccctggaccaacatcaccggccgcatcgatgtcgctctcccctccgccacccagaacgaggtctccggcgacgaggccaaggctctcatcgccgctggctgcaagttcatcgccgagggctccaacatgggctccacccaggatgccatcgatgtcttcgaggcccaccgcactgccaaccccggcgctgctgccatctggtacgctcccggtaaggccgccaacgccggtggtgtcgccgtgtctggtctcgagatggcccagaactccgcccgcgtcaactggtcccgcgaggaggtcgactcccgtcttcagaagatcatggaggactgcttcaacaacggccttgctactgctaaggagtatgtcacccccaccgagggcgtgcttccttccctcgtggctggctccaacattgctggtttcaccaaggttgctgaggccatgaaggagcacggtgactggtggtagatcagtcgccctcccgtttattctgggcggtgttctgtgatgatttctgtcctctcttgaggagaggcagcttcgatgcattttattcttttctttcaaaatagctttttaccctttatgtcaagcgggttatggatagaggcgcttggtttttcccctgttgcatttgattgatatccccacttgagcaccgctgtttgttttggttctgcacttgggattgtcatgatgataacgagattcaatgaatgattcaaaaatacctgtgccctgtaaactgtagatcaaagtagagccctacggttgcatgaaactttcaatccttcaatcccatgaaaccctagagaaatctatagatccaaatcaggtgttaatctgtcatgtccaacgcttaggccccgaccagtgctgcagcacttgccannnnnnnnnnnnnnnnnnnnnnnnnnnnnnnnnnnnnnnnnnnnnnnnnnnnnnnnnnnnnnnnnnnnnnnnnnnnnnnnnnnnnnnnnnnnnnnnnnnnnnnnnnnnnnnnnnnnnnnnnnnnnnnnnnnnnnnnnnnnnnnnnnnnnnnnnnnnnnnnnnnnnnnnnnnnnnnnnnnnnnnnnnnnnnnnnnnnnnnnnnnnnnnnnnnnnnnnnnnnnnnnnnnnnnnnnnggccctaccaatgctgtctcagaacatgtggctatcaaaatgtggcttgcacccacaagatacaagtcacgtgatgatggatatgctttgtcacgcggtgattacgtaataccttcacgagcctcggagccccgaccaaagaaagagctatccctcccagcctcaaaacccgtgacctattcctctaaagaaaaatgactagcgcgagtctgtaacttgcaattcctatttctacaacatccgcggcgcagtgttatgttgtggagatgacaatgctgtcggacagggcaatccccgaacaatggaggaccttcctccaccaatgtttggcgaaccgtatagatatagacgagttcacggacttgtccgggctgatgtttgcccgcgcaccggttaaggaaaacgagctccttgatctgctccttgaagctcgcgcttcttccagtgttacctgggaccctcttttgccattgtacgtcgatggactgtgcaagattgggagggttaggtcttcgtctgcgctgacgagtttgctgaagcattcttctgttatggatgcgttggggactggtgatggcgatggtgaggagggacagggacacggctctccgtccaaggctaagaagcacaaaccgtccacgctcatgactgatatcaaagtcattcaggatgtcatggtgttcatatccaccgggtcaatcccgaaaactgtcatcgaagctgcggatatatactcggctaccgtagactggattctggccgtcgtggcgtggcacaatcacagctctgactctgagcacgcgacgggtggcttgatggggtcgcctgatgcggtctcgttgtttgagtcgctggggattctgcttgccgctctgtcggggactggtaaagggctggaggtgttgtccagtgattacaatcaaggtatgtatatgtggtttccgtgtttgttacacgttattaacgatatcctctagaattgaaggcgaagctaggacaggctttgtcaagctacttgcctctctgtatcgatgtctctctgccgctgaggcatcgtttggaggggttgcagaaagtgtttcatctttaccccggtcaaccttctaaggctttgggtgggcctgctattgacggtgttaatgtcaatgccctccagtttgagtcttccgtcatggatggccccgttattaacactagagctgggctctatgtgtacatcaactcgatggtacgattatcttacgctacgatgttggttcatggctgactagtaacaggtcgtgggacgtcctttggtcgatgacactattctgatcaactacctcaccaatcgataccaggtaagtccaattgacacgatttctagtcagagttgtttacaacatttgattaacccttaccagggccacaatgacgttctcatcgaggaaatcatcacagccgcctttgatgttctctccaacggcgtgtatcgtaacgaatctggccgcacgatgctcttattccggtctttccttgtcaacaagctccccgccttttttgcagccatctcggcagcatccatggtgccgatctccatggaaatgtgtatcagccacgccttaagccgtctggatccgaacgcattcccctccttctctcagatgttctccatgcagggcagcagtgttttatcagatgctcgccaggagttcctcttcgcttgtgcgtcgcacaagctcatacgagaatccagcattgaacagcttctcggagaaaatcccatgcagacactgcctggtggcggcccttatgtcaaggatgatctcgtttcgcaaatcaataacaatcatgaacgtgctgagcaacttattggtgagatcgagtcgatggagggtaatgcaggcgcgatagttggcgctgtggtcgatgtatgttcgatccgatatcaattcctgggagtatcaacatgctaacttcttcaaggtcatgcaaaatttgtgtcatcaaaaagagacaatgacgctcaagaatatctgcaattcgctctcacgccgcccgcagactttggacgtcatgttgcttttccgcactacaaagcaagtattgcaacctctttgcgctgtccttgattcctggaagtgggacgaggaccaaggcgaaaatcagcctgtctatgatgaatttggcagtatcttgttgctcgttcttgcgttcaaataccgatatgatctgagccctactgatatgggtatctcgaacaatgactcgttcttgttgaaactcttggaccggggcgcttgcagccagaagctgagcgacttgagcgagaagcaaaacaaagatctcggcgcttggatcggagctctgttcattgccgagggcatcagtgaagagaccatgtcctcttgcagcccacacgaattctacatgcttgtgacgacattgttcgatcagagtcttggggcgtgcgagtccggaaagctagatttcgacactctgaaaggcggatttgaatgtaagaaaatcttcacgcgatcgcttccactggatacttagctaaccgccataaagatctgctcgagcccttcctcctcccgtccctagtcgtcgcattgacatggctgggcaatcacatctgggaatcagagaccgaccccacaatccccatcaaaaccctccactccctcgttaaacccaactcaatctccggcgaagcccaagctatccaccaaacagtcctgaacataaccggctgtccactagaagagcaactaaaaaatgtccgaacgagaaaccagtcgcggacagacatcaaaccaatcctcgatgccctggagccatacatctccttccgccgcgtcggcagctgtcgccgctccgaacttgacacctggacgtcccactccgcgggcgggctaatagccagcatccgcacaactttacaagctctcgtcctctggagcgccaacccaggaatcagcatggccccacacgcatacacgcaccggcaggtgctagcagggattcgtatgctgggcgcaacacgtgtgctaggcgcgataatcgacgaagtcaagcagcagagcgaagcaggtaacggacatatcgcgctagacattgcgacgacgatggtgtgcgctccgatgacggagtccttcgccgtcgaccaaaacaactaccacccagtcgacccaagcaaggaggctttaccacggtgcgcgatcctgacgctgcgcgacgccttgtcactacagcacgagaacgtgcccaagatctccgagagtgatccgctacgcgccgaggtcgtggtgcgacttgcgcgacgggttaatatgctcatggcgccgccgtcgcaggtctcgaacatcgacgtctcgaatattattcagaatatgcatcttggtgttgaggggcatgaggatcggatggatcttgagccttccgctgctggtgtttcgggtgatacggtcaatgaggatgatccggataatatcaatcagatgctggataaggcggcggcggatgcggcggctgctgggatggatgggggtggtattggtgtaggtcaggatatgggacttgatcatggggctggcatggatgctattgacgatgtgcttaatgcggcggatatggcggttggcaatcctgagttccttgacttggatatggaagacatgttttagtcgggatggttttatctttggtacataatctatggacttacaatgtccaatctttgcatggcattttgttcgatctatgttttggcgaatgatgattcattggacaacgaaaaataacaattatatcttcttaccggaagaaacagaagaagagaaataaaactcgtattgaccatcaaaaactatcaacagagcactagggaaaagaagaagaggacctcaggaccaaagtacccaactacggccctatcagactgagtcacatgactatggatttccctgcaggactaattctctccaccaatcaccatctctcctagaagaccccagtcttgttctttttttggcagtttttcaattccttcattttgaacacctctgaaatattagaaatggatataagatggaaccagcgtaaggaacatcatgccagactcgctgcacaacccacaagagaaaaaaaaataaacaaaataaaacaccatcaaccccatcgccccataactagcaattcgatcctatactccgcacccaataataatacaccatctagctgcgcctcgatacatcgtcgacataggacctatgactcactcaatcctagaaaccggagtatgtctcagtagccgacgtcgtagttaccacgatgcaaaagcaaaagccatgtacgtacaaatattgaaagtcttctcaactttcccggccagctggggaatccccgagccagggaaaagtttctccacagcttgcatgggggtcgggaggaggcctcgtcggttattatttctaataggattgagtgggactgggcctgctgctgccagagccgagatggagatggtggcgaatattgtagtgagtttcatgttgagctgtcttcttgaattgctgtggaactgaggtggaattgctggtcgttgactccaaggtggaaatatatatatcctgtgtgttagtggtcaagtctacgtaactagtcaatatgctgttgtaggtaataacaaggtatctgtctaaagggtcacttactatttcctgactaggtgactgtagtagtagtggagtgcttgatactcttggattggattagcagaagagagagtacccctttccaatgaccaataatgcctggcacggccttcttatctacatccccgagtttcgtgctttgtgcctgataggccttcttatctgccatcctgggtctggggctaggaccctcatgtcggggaacttcaggcatgggtctagctcattccgatggcttgaaggcactcatgggaagaaggttttccttcggcgtggggaatttgagggaatgtacgcgacggacgtgtctagacttacggatggtgttgagggttgtacagggttgtacatttgatccgctacttgacatctgcagggttgttgcaattatcagattgatacacgcaattattgaatgaagatcgcgcaattactgtatgagacatattctgatcatgctagaatgcacctcttatctccatgcataagattagttacacccctgtcaaagattctttagtgagatgctgttcagtcaagggatacaatccagcccttgaatacacatcgctactagaagttagttccttttctgaccatagggaagctgaatgaacagattgtgaacattcgttgctgtcgtcttgaggatatttatatgtaaataagtatgggcccaagtgaatacatctgagtctgactttcgataattcttccaccccacctgccacaacccacctgagccaagagcagcctgttgatccagtgctccgtatggctccggtactccgtacaatgtgagactagctctcaaggtagccccgtcgtccgaccccgctgctcattgaataatctgatctttagtgctcatctttgtacggagtactccgtacggggaagaagtacttctacactggaagcgctgtcgtgtccaagctcacagtctttgggagtagattgtatattggatggcactcaggagcatgtctttgatgtggttgagacccccagcagccccaaggcatgcatgacgtgatattcccggaagaatatataagaatacccggtttaataccgatgcgtcaattaatctgcctagcaagaacaaattcccccccttactacgggcctcgttaattcaccattcttcccatacaaaagtcgtcataacggagccgagccagttccggccaatggaagtgacttgccgatcaatctccacttgttcaagcacggatcacctttcaaaatgtcggtctccgagagtagcggcgagtcctgctatttcccagagtggaaattactcatttggaactttggtggggatacaagagactgctgtaggtaaacaaggtataggcaaaaagcagagcactattagaacgcttcttgcggtgtaaattcgtatataaaccaactacatttatacatgatgtgtggggggcctggacctacgaacccctggaagtaaaaatcatttcactgcgtatcaattgattcgttagagtttggtctagaggtggggggttacatagacgcggccagtgctaataactgaacgaaatgtcagaaccgttggacctcttcattcaacacgcaagatgttgcgcagacccgcaaaacggatctagacaggcagtcgcaaattgcctctttgggaacgagggcgcatattgcctgattgggaacacggaccgggctagaatccgattagataagacccgggtagatcgggatcgtcagggaacccggttatcgggacgtatcaccctgcggaatcgtcacgctttccgcgtctcggcattgttgattatttcatactaggcataactggctttggcagttcgtttgagggggaactttggtttcgccaaggcgcctcaatctagaactttaaatttttatccggaagacatataaacatatatccgcttatagctcgttcaatcgccacggatgacgaacatcgcgtagaggtttcgaagccactcatacaaagtattgcccggcaatttcagctggtagtgatccaccatgaaacgagaagtgggaacaatcgccaaaacatgcaccatactttgtactgtgatctgcatcaatcaaatagtagccctagaagccctaaaagcctcatggatccagacaggtactccatagaagtcggaggaatcggacctttccggcttccaatgcttatctgttgaggcattattggttagacctggaatacaactagttcactggacccaagatttgcccaaaagtgggttcccttatggaactcggcctttgtgccgcgctttccaggttactttggatctattcataggagtaaaacaacatctttcacattagcagcaatactgaacgaaataatggtaacaaatcgtctcagccaatcgcaggccactgctcaatatcgcccttccgatctcctattccctcggtctggagtcggcacatataataactcgccccctttgcagaagattctaagataaatatgctagtcctcccaatttaattacttctgctcttataataattttttgttccctgaccaatctccactctttcaaagtctcccatcatggagcagcatcccgatgatgcgtcgctgcacagcggatatcacaatgacgaagacgagaagaaccatacgcccgtccacaagctcaacactcacgatttcaccagcgtggagaccctccacggaccccagcccaaccttcacgaatcaaagagtaccgagactctgaacgtcgacaatgaggatgactctccaccccccaagaagaaggcggcggattggcacatgacatcccatgtgatccgaaacgcagaacgggatgaagcagctggcttcaagaagcgcgagctgggtgttacatggcagaacctaaccgtcgatgttcttgccgccgaagccgccgtcaacgaaaacatgatctcgcaattcaacgttcctcaattgatcaaggattggcgccgaaagcccccgctcaagtcgattgtgtcagagagtcatggatgcgtcaagcccggagaaatgcttcttgtgctcggccgtccgggctcaggatgtaccacgctgctcaagttgctcacgaatcaacgcgaaggtttccactccatcacgggtgacgtgcgtttcggaagcatgactcccaaggaagcttccgcctatcatggccagattatcatgaactcagaagaagagctgttctacccccgcttgacagtcggtcagactatggactttgcggctagacttaaggttcctttccatcttcccgaaggagtcagtgtcgatgagtacacagccgagacgaaagcattccttctggagtctatgggaatttctcacaccgccggtactaaggttggaaatgagttcgtccgtggtgtctccggtggtgagcggaagcgtgtttctatcatcgagtgtctcgcgaccaggggttctatctactcctgggataacagtacccgtggtctggatgccagtactgcattggagtgggcaaaggcccttcgtgctatgactgatgttcttggccttaccaccattgtgaccctctaccaagcaggaaatggaatttacgatctcttcgacaaggtccttgtccttgacgaaggacttcagatctactatggtcctgcaactgaagccagacctttcatggaaaagcttggcttcatccacaccgagggagcaaacgtcggtaagtgtttcctgcatctgtcaaaaccccgacaccaactaacacaacgataggtgacttcctcactggtttgacagtcccgacagagcggagagtccgacccgaatgcgaacgcacattccccagaactgccgatgccattatggctgaatacaaaaagtccagcatctacactcgtgagattgcaacatacgactaccccgactccgaaatctgccgcgagcgcacagaggcattcaaggagtccgttgcgtgggaaaggtctaaccacctgcccaagggtagtagtctgactatcagtttctgggctcagctcattgcatgcaccaagcgacagtaccagattctgtggggtgatatgtcaacattcatcatcaaacaagtttgttcatgtatcatggccttgatcgctggttcttgtttctatgactcgcccgacaactcattgggtctcttcacgaagggtggtgctgtcttcttctcgctgttgtacaattgtatcgttgccatgtctgaggtgactgaatctttcaagggtcgtccggttttgctcaaacacaaggcctttgctatgtaccacccggctgcattttccttggctcaaatcatggcggatttcccggttctgttgttccagtgcactatcttctcggtcgtcatctactggatgtctggcctgaaacacactgcggctgctttcttcaccttctggattattctgttctcgacaactctggtaagtcgtcgtttctcattcgatttctttgaactaagactaactatgactttttcagtgtattacggctgtcttcagattcattggatccgctttcagtaccttcgaagccgcgtctaagatctcaggaactgcagtcaagggtattgtcatgtacgctggttacatgattcccaagcctaagatgaagaactggttcctcgaagtgtactacacgaatccctttgcctatgctttccaagctggcctgacgaacgagttccatgaccgcacattcccctgtgttggtcgcaacctgatcccaagtggccctggctacgaagacgtcggagctgataaccaagcttgtgcgggtgttggtggtgcgttgccaggcgcgaactttgtgaccggcgatcagtatcttggataccttcactacaaacactctcaactgtggcgaaacttcggtgtcgtctgggcctggtggggtttcttcgccgtcctgacagttattttcacatcctactggaaagcagctggtaacggtggtgcttctcttctcattccccgcgagaaactcaaggcgcacaatgctgccatctgcgatgaagaggcgcaacgcaacgagaaggcccgcaaccacgaaacccccgatgcccccgccgaggttgacgaagggaatctcacccggaacacctctatctttacctggagaaacctcacatacactgtctcaacccccaccggtgatcgcgtgctgttggataacattaacggatgggtcaagcccggcatgctcggcgctctcatgggatcttctggtgcaggcaaaacgacactgcttgatgtgcttgctcagcgtaagacagacggtactatcaacggttctatcatggtcgatggccgtgagctcccggtttctttccagagaatggctggatactgcgaacaactggatgttcacgagccatttgcaaccgtgagagaagcacttgaattctctgccctccttcgccagtctcgcgacacccctcgggaagaaaagatcaagtacgttaacactatcatcgaccttctcgagctccacgacctggcagatactctgattggtaccactggaaacggtctcagtgtcgaacaaagaaagcgtgttacaattggtgtcgaactggtctccaagcctagtattctgatcttcttggacgagcccacctccggtctggatggacaatctgcctataacaccgttcgtttccttcgcaaattggctgatgttggtcaagctgttttggtaagtcttcaatctcctcaactacaagatcatattgctaacaagtcatgttctaggtaacaattcaccagccttccgcgcagcttttcgctcaattcgatactctccttctcctcgcaaggggtggaaagactgtctactttggagacatcggtgaaaatgcgagcagcatcaagaaatactttggccaatacggtgccgtctgtcctaccgagtccaacccagctgaattcatgattgacgttgttactggtggtatcgaggctgtcaaggacaaggactggcatcagatctggctcgactcccctgagcaaagccagatgatcacggaactggacagaatgattgaggacgctgcttccaagccccccggaacagtcgatgatggttatgatttctctatgcctctttgggaccagatcaagatcgtcacccagcggatgaatgtcgcgcttttccgaaacaccgactacatcaacaacaagttcgagcttcacatcatctccgccgctctcaatggtttctccttctggcgtcctggcccaagtatcatcgctctgaatctgaagatgttctccatctggaacttcgttttcgtcgcccccggtgtcatcaaccagcttcaacctctcttcatccagcgtcgtgatatttacgatactcgcgagaagaagtccaagatgtactcctggattgccttcgtcactggattgattgtttccgagttcccatacctctgcatctgtgccgttctctacttcgcctgttggtactaccccgtttggagacttccccatgactccaaccgatctggtgccaccttcttcatgatgttggtctacgagctcatttacaccggtattggtcaattcatcgccgcttattcgcccaacgcaaccttcgctgcgcttgtgaaccctctgatcatcagtaccctcgtcatcttctgtggtgtcttggttccatacgatgagctcaacgtgttctggcgtttctggatgtactacctcaaccccttcaactacgtcgtcaacggcatgttgaccttcggtatctggggtgccaaggtcgtctgcaatgaagatgagtacgctttcttcgacccgcccaacggcacctgcgcggattacctgtcggactacatggctggcactggtaagggtatcaacttgctcaaccccgatgctacctccgcctgcaaggtctgccaatacaaatctggaagcgagttccttaacactctccacatcaagaactacaccaccggatggagaaacattggtatcgcctggatcttcgccttcagtggatacgctttggtgttcggtctcatgaagttgagaaccaaggcttccaagaaggctgagtaggttgagcgtctgttcatcctttctctcaaaaggccatcatctcctcgggatcctcattacttgagctttcccctttcccgatctttcctcctattttctcactatttccttcttcacttcttccgttccttagaggactatttccccaaattttgccatacattcactacccagcccttcattcatggagccctgcacctgcgaatctcgatcctctagtcatcgagcatatttgtcatttccccgcatacatgttattagctagcatatagactgcatatagatcatagaccataaccatatagaatatagattgtcattctcaaaatgttgaccaaagaatcctcttcgagattaaattgtagcagttagaagatcattgatgtaggcattgcttgtttacatccaatttgtctggcctccctttactcctctaactagttatgattctttgtctttcaatctatgtcgctttgtgcacatgggaagctatttcgaaaaatccatgacagtagtccaatcatcaataattacttcttatttcttagtgacgtactgtacgtgcgtcacatatgtacgtgatatatatccacaagcccaaaagggaaacaaaagcatagatatatttccgaggtagtcgattcagactagtaatatgaacccgtattccaactctccgggttagccgccagtatgagaaatgtacaacatgcgggctactttctgaattttaccaatatccaaattgtgatgaagttgcatcaagactcaggaccacaagctggcgtgtggagatgcgtccatggatgtactggagaaattatccggagagccgagattgtgacacatatcccaccttcccgattaggcagtattcgaaaagtaactccaaaatagaaagcggaaagaaaaaggtctccaagattgtagatccatgattacctccaccgagcgaaaagatacagacccgaatgctcaaggggaaatgacggggtcgacccagcgtcatgggccaaccttggaagaaggaccatttgcatttctcgcatggccgatcattgcctaattattgtaagctgataccgacaacatggaacctccagccatacttaaactctctcattcataggagtacggagtagcttaccccaatttcccctgggggacatgaaaatcggagggacattgcgcgatgctgcacgcgagtggaaactcgcccgatgaagaacttgggatctgcacacgagctggttttctgcaggaactgtgatgagcactttcttgtttgagaaaaaaaaagaaaagaaaagtgcctccccgcatttcccgacaaaaatttgggtggcataggataggctagaatttctcatcacatcccagacacacaagcacgggtattactgtgttgcccaggaagcattgctgatcgctccatatatctccttttgtagaaatctggcttaggtggggagaggcattgaaaaatgggttgcgggtaagaccctcaagctagttgaacaagagagtattccgtacgctgtcatgataatctcgggaaatgtagagtttgaatgcatgctctttgtccatttcgcacagaaaccgtccttgttcccgcctcttttctatcacatcatccagccaagcaaagatcagcagtgatagagtaatagtggagtgaaataataggcgtggcgtcataagaacaaaaagcaaaagctccgccgtgagccttctcctcgtgtacctgtcgggctttgccacttgtgtggtcctttggagcaaataattgttgacttcagacatagtgcccattctcggctaagcgggatccttgctggaacaacaaacaatgtatgagttggggagaaaaagcggatgtgatgagtttgccgttgaagccataaatcatttggttcggcttaagcctcaagtccttatttccacatatggcgcggtgacgggataattgttcataaattgcatcaggtgagacttgtgctatgtcgaaggttacgaaacagaattctggaaacagtggagctgatgcgatcgcgcttgaaactggtaatgtggaggttgtttcatctcgggtgaaaatgagactctctcagtatacttcatagattagttcagtgaagccaaaggaataagttgtaatgattttggaagtgttgtcaagacgtgctggtatccacgtgacacgggcgcgtagtcacatgtttgtttttgtttcctcggcatctgcagtctcaataataggattacaggatcaataatctattctaggttctgactacggaatacggagtattgcccactctactctataaacatacaacatacaacatacggagtacggagtacggagtacatcgtattaaattctcccctctatcacgtcgccagcgcggatgcgagggcgatccccctctaaccgtgccgtcccgcactatacatactgagaatgattcaattagtctaacgcctatcatattgcccctttcatcccgtccccaaaaaaaatggcccaggtgtggggagtgcggtctacggtcagcacattacaatacatataaggaccagcgaaactattgatacaacggcctgacgcgacacaaagttatcaatagtctacggagtaccgtctgtactcctatgagaacgatatgtccatcatcatggtgggcgatcattatacaatatataagccgtacggagcacgcagtgcctggcgcgttcctccatccaaagccaagatagccttcttgtggggcacttcgagtcagcaagatccttcgttaatcgttttgccatggccatctttttgataggccctgctagttttctaggccccccacgcactctcaaacccctgctcattgcgcaacggccaagccgattcaggggcattgacagggattgtgctgttagtcccgcattgcaattcaatcacgtgagacgtcaaacaaagaactcgaacagccgggatctcaatgacgctttgagttgcatgccccgaaactacggtgacctcaaatcagtttcccggtatggaatacaaggtatgtaggttctggcctcgaactctaagaaaactttagaactgcacagccgcccccctattcaaatttgaggggacgttaaactattgattttaaagcagaacgagatagagtagctgtacccagcttagggtttgaaattaattaatactgacagttaatggacttcacaaagtggatttatgagcacatccccaagcccctgactgcgagcctccaccaaggcaaatccgagtcattgtccctggaaccggaagctctcccgcgagcacacgccccataactaggccaaaaagtgaaagggaaaaaaagctgtgatccaattttgggcaatgctctatctacctggttgaaatgtgggctctctggacgcgattatcgcccgtcccaatctaacatctcagatcccgcacaaagagataacaaagaaccatatcgcgcgtggcggtccagccggtcgattctcatctaggacattgcgtctatcccagtccgttcattgtgccgctcgtttgatgcatccgactgcttgacaggtacacggtaacataagctgtcatatacaatctattagtggcgtcggggatgtccaataccgaaaatagaggcgcagactagcccctaatcccggagacaggtaccgtctagaccgtggcgcggaaacgtgctagccagccgtgcgcgtccgccttctagtggctttctagacatcgcgcggaggcctttccggttaacttaggcttggaggatttcattttcgtgtgggtttctccttaaggcgaaatgaactgtggagtgtcataagtgtcatgagtggagatgtgtgcgtagcttctatctttctttgttgattgccttcatatcgccccatctgcgactattcctgggccgttctctttcatgcgccagtctaagtggggtctcgtattgaatcggcgatgtgaaacttacgccgtatgtattgttgaccgttacgatctagcaaattactatacaaggtccggtattatgtacttgttctcggggtactttttaccgctcactggatccctgtactagtctatcaattctaccattttagatggtctagatgtctaggattatctatctgctttttgggctgcttgcaatatccatacgattgtaaagaatttgcggagtacgaagtatactctgttattgaatggatactccccccaccgtgatttcatgagcttgcattatacatatacagtactctgtatgtatgttcttcattttttaactcgaactgtttgtcaatacaaagtacatcctataataaatttaggtatagatgcatgggccatgttacccctgtagacatcaaggtttcgtctttccgctcgcatccatggatgagctgcgttaaatttaatgtttaaaattcgttaatcgggttctttagtgatatacacacgctcaatgtggttgttatggtgcagtatttcaacttgattatttgactaacattattttgagcaagagcttaggctcgatatatagatcaagagggtgtacggagtttgtagctgacaattcacaacatacgaatcacgatacagcgagatatgatcttcgaatatgctctatttcgagattgaactgaatagtctagtaaatctaatagactgtgacacagcgtggttacacaatcgcaatcgtggggtaaaaggccatgaaagaacagcattctctcagccatcaatagaacctcgaaaacccggcgagaaagcataacacaacttcgaataaaaatatagtaaggaaccatttctgcttcccaaatcacattagaccctatagcagaccgactttattgagatcataaccaaaattgtaaggtttgagcgcgatcttgcagccgaatgcaggtacctgccgcataaaactgcagtgttctttcagcctcaaccgttcaccgcatctcaacaaccaaggccacgaggtgacacaagataatctcgaagacttaggccgacagccttcggattgtctgaatgcgcttccgcgtgttggttattggaggttgtgctacaagatggtgaggatagattatatggatgtgtctttcatgttgccaagcaatatatatttgaaaatctcaaggtctcaactaggttgtagtctaatacagaatctttctacgcggtcattcctatccgtggatatatatcggcgagacaagacatattcaactagtaggctactccataccacctgcatccaatagaggctctgtctaaacgaaagctacgtctggaacctcgtctactactctgactgcatagcataattatacatcgctatttggcacgttccactgaccctcggataccaacgtggatattcaagacatctcagatctctagcatgctttcttccagcaattgccctatgaggctaaccatgagtaagattgcatctgaagattagtatcttgctaatccgccgcaagtaagccggtcatctcccatacgagagcagtacgagaactagatcatgtcgcacgaaagagatacatttcggtggaggtatcacccgaggtaatcctccagcaaaaatacgctgacatcacgcagagacacatgtgtctatcaccgaacccattgctgatccggattaacaagactccttcctaaacgggcatatggatgccggtcgggctcctcaacctcggggaacattaaacagaccaaactaaatgtgacgatatcactttcccccgacgatctcttgtcaactagacgggttctgcagctcaactgcacaatggctatagtccaaagtcccttgggagaacgaccgtgcatgccccactacttgggcacgagtctgccggaacgtgatgtgctcgtgctatacagctagctgataaaatcgcaagctagcaagttaagctaatggactacatgcatatgcaggggtgattgatttgtgctgtacggagtactccgtacaccgtaggtaagatcgatgcgccatgagacaagcaaacagtttctctgagaccacgcgggctgacccgtcaattgtatcacgctatgagttgcattgtgcgacttgtttttgtttacagtgtattttcctgagatagtaagagattaagagagacaaagttccgaacctgaccataaccaaaccgggtgtaaatttgagtagcctcaatatcggttcgacgcgatttatatacgcgaccggtaaaaagcagatcatctccattagagatagaatgggacttggtccaggcaccacccctctgccactctgccatggctttgaacccgactactccgtacggcacggacattcgacccattgaaggtatggcccgcagatcgcattttgcttgcccacctaatgtgatggatatagagggggcttgcattaccctagtatgatagccgttggttggacccccacgagggcgagacgttcggagtatttttatttttttggttaagctgccaatgctgtttaggagctctagtcggctcggttgatagcttcgctgacatacattagtcgcacattagtttataggaactatcacattttgctctttcccaaggaggcaaatatcccagaacatgtgacgggcaaccaatgcatgaggagaaataattatgcgctttgcacatttcaatgttgactggcgactgcaggatcaccgagtttacgtagttctgcgaatcggttggtcgaactacgggaggacgtgcgacgcaactgtgatggggaatgggagaatggccctatggatactatgatggtcatagttgtgtattacgagctcgatactaagtgtctttctccaagcctagaccgtgggttattcaattttgcgatggttcgctcaactgttccgatgaggacctcagaacgcgttgaccagatattcgtatattccacctagcgtttatagaaaatattccgaagttcattttaagtcgaggtacttcgtacattctattgcaaggcaaaagtacatcgaattttttcaccggcaaggtactcccgtatctcgcctcgcatctattattattcgaggtcttagacatgagcgggtccgcatcatgagatccccctccacgtactccatagctacgatctagcaaggattgaggatgcctacaacgtatgcaagcatcgggtagcgttgcgacagtgtttgctcaactttttcgcaactcgcaacagccaccgtttgtggatcctgtttgccaattacgaacctgttcctacgattatcgccccacgcgggagggggaaagaaaaggagggggatcgcagtatggtacggagtactcggtacaacgtacatacaaactggtctgaatgtcaatagagaccgaggtctggacaagggggtgagcagggatattgggatttttgatgtgaggtacggatcaccgagggatatggaccctatttgcaatccgctggaaatcaaccataacggtcagaataaaaaaaaggcttttggctgctgtcacattgggggccactgcgttgtcgatctcatcccggagagatattgatgacaggcgaacaaaagacccccgtccgtcacttttaatgattgatcgagtctccctgcaggctctagcacacaacacggtcaatgcattttaagacatgaacctaaccccacaggatttatttggttagggcaatgtgattggtctcagacgggagtagcattccaattctaacaaattaaaacggagaatttgtcgtggaaggtctggaacagagctcggcggacgcaaggtggatagtgagttgatacatgtgagatgtgtaccttttcggcgggttattagggttgaaggtacctcctgacctggtaccgtgttatgaagtgagtagataggccaactcttggggaagaagggctatctccaaggccggtttttttttgttggatttcttctcttgctattactgtaatgatctcaatcttggatcttcttaccaaagataccccgtagatactattgaatacatgttgtctgcacataatcccaaaagaataattagccaaatccaaataatgaaaaaaacagaaaaaacaaataaaaaacaaaacgcaggaattaaaatacggccttcggtatgcgtacggtacatcgccatacgggctcataccaggtggagcgtggatcgtcccgatcgagtcccagaagattcaacctttagccctttcaaactcccaaagagctattattcctcttatttccctcttttcccttctccttttgattcaaagctctcttcattttccactttttgtactgttgctaccggtagcaatcgcgatacttagctatacttagcattctttcacttatatcccttccgcccttgcgttgccttaatagggaatccctcttttccagctttgcgtacagtccttgctgcgatccttagcatcttgccactctccccttcataggcatttgcattatttatccattggaagctgttcatcccttgatattgggacctcgttgcgactcgtcatccctccgggaccttgaataatccggactccttgaaaggaagtctgtttggatctgtttatagttttcgattacttgttaatattgcttcttgtgtttgtatgtccagtgcaaagttcctaaatccttcccctctcctggcattcctagccctcaacctccttgggcgcattccaatcattcaatccctccagggctatactctatactatccttgagccccccaattgacctagattgtgtaggatcaaccccagcctctggcgatctgattcctcccctccatccttgattatccaacgccacttcgcctacgatacttgactttcttttggatccattgagccatgtccattgcacttatcgaataaacgcccccggtcagtgacctcaacggcgagaaagaaattactcagtcacgatatacccaagagatggaatcaatgaagccacatatccccccattgaagatctcgaaatccaattcgaatttatccgagtcgagcaacgacgctacatctataccgattcgatcttactccggctggggctcatcagatatgacccctccgttaacgccacaaaacgcccaggacacaaacatggatcaattggaagccccgaggcctgtctttcacaactatctgcgcgccttctacccttttcacccggctggcaatgtctctccttcgaccgttacactcccgctggaccagggagatatcattttggtacactccgttcacaccaatggctgggccgatggtacattattagattctgggaatcgcggctggttacccacgaattactgcgaggcttacgaccaattacccatgcgtcctttgttgaaggccttgactgatttctgggatatcattcgaggaaacttcgggtcatcactgaaggactttggaaatcaagacttgatgagaggccctatcgctggcgtccgctttctactagtaagtatgaattagaaccgagaaacaattacggggcttatcattccacaggaaaaatcagaatgtcttactcgagaatccgctctggtaaggcgatttgagggactacgcagaattcgaaaggctttgctatctgacctgtcttcgctggtgaaaactgcgaaaaagttccaggaaattgcaaacgggctcccgtcagaagacgaggttgaggccattctggatgagatgcttctcaaggctttcaagattgttactagaggagttcgattcctcgacgtctggaacgaggaggtaggcttgggtcggactatcgccgagatggatgggcccaacgaaagctcaggccagtatagcatgccaccgactcctgcatccgaaactttcaacttgggcgagaacgagggacctgatcgatctgcgtcgcgaatgctggaatcacgaatggaccatagccggatggatatgagtcgatcatcgatgcgcacggagatggttgatcctagaccggcctccgtcgctaccaaacgggtttctgtatcccaccgcatgtcagtctccggcccttcgactgccatcgttgcccagaatctggcatccgaacgcctgggaacaacatatgatgcattcctcggcgtacttggctcattcctcgggttccatatgcagtcccgctcctcgatggagttggttgtcactacacagcaggctgtcgaggcatgcaagcaattgctaaacgtcattgaggtagtatgtgagcatggtacacatcgcagcgcgtttctcgaacaggcacgagagttaatgtgggagaagctatctgagctcgttcacgctgcacgcgacgtgtttcgtcccgcacaaatgccagaagatgatctatttttcatggtagatgaaggaaaacgccttgtgggtgctgcgactgactgtgtccgagcagctggaaactgtttggccaaggctcgcctggtgcttgagcaaattggtgaccttgagcttgaccctgaacacttcgaagaggaaagacaggaattgtctagcgttgcctctccacaagatgaaccgcagactcccgtagaagaagagcgacaggagatgtcacgtcttcccccacctcctcttcagatccctagcacacctgctctcaccgacgctacaacaccttcatcctttcagtctcttcctgcaaattcccccgccaacatcaccgccatttcttctttacctaattctgccatactccccacccacctcgagaacatctcttccttctcctccactgacagtaactaccgtgaaagtcatcccaagtctgatatgagcgaatcattcggacgtggaattacaagcaatggcagcagcttcacgtataatagccatgcacgtgattctgagatgagtggcgtttcccaaacctcgactcgggctacctcgcctgatattgggggtagcttccagggtagcttcaaggttcactcgctgaaggagagtctgagctactccaccctcgccgaggaaaatgaggagactgaggccaacatcctggagaagactttcgcacacgaacttatttacaaggaaggttcggtgatgggcgggagtttgcgtgctcttattgagaagctgactgctcatcaatctacccccgatgccatgtttgtttcaaccttctacctcaccttccgtctgtttgctacgcctcttgagtttgccgaggccctcgctgaacgcttcgactatattggtgagacaccccacgccgccggacccgtccgtctgcgtgtatacaacatcttcaagggctggctcgagtcgcactggcgccacgaccgcgacaacacggccctggagttcatcgtcgacttcgcaagcacacgacttatggcggaccttcccactgctggtatgaggttgcttgatttggccggcaaggtgtcctccgttggtggtcctcttgtgcctcgcctgatatcttccatgggcaagaccaacacttccattgcccaatacattcaccccgatactcccttaccccctcccatccttggcaagaaggagcaccacttgctcaagcaatggaagaacggcgaagcctctataaccatccttgacttcgacccacttgagctcgcccgccagctcaccattaaggagtcacgcattttctgctcgatccttcccgaagaactgctgaacacggaatggactccaaagtcaggatcgttggctgtgaacgttcgcgccatgtcaactctctcgactgacctcgcccacctcgttgctgactctatcctatacctcgaggagcctaagaagcgtgccgctaccatcaagcactgggtcaagattgcgaacaaatgtctagagttgaacaactacgactccctcatggcgataatctgctcattgaactcgtctatgatctctcgactgaagaagacctgggacatcgtatcgcagaagaccaagactgtcctcgagcagctctgcggtatcgtggatgtgtctcgcaactacgcagtactccgtcagcgccttcagaaccacgtccctccttgccttccatttgtcggtacctacctgaccgacctcaccttcgtcgaccacggcaaccaatctctccgcaccctctccacccatgacagtgaaatgactgtcatcaacttcgacaagcacatgaagacagcccgtattatcagcgagctccaacggttccagatcccctaccgtctgaccgaagtcccagagctacaggtctggatgcagaatgagtttgtgcgcgtgcgctcaaacggcgaaatcaccacacaaaccttctaccgccgctctctggttctcgagcctagagaagcctcccgcagcgcaaacaaccttcagtcccagtccgagcccatgccttccatgcttgacaatgccaaggacaagttcgacttcctctcatggaccaaccatcccaaggcgaagtccgtcccgacacacggataactcactcactactatacaccatcacctatcccatccctcagaacctaatgactgatgacttcttcttctcattcccactttactggtgtccacatccacatcatcttaaccattctattatgcatacgtgcatcaattttctcaaaacccatcttcttacgatttgtgaatatcccatcattcttgtcttacctttttactttttttattttactcttgggtttcttgtgtcttgtttttgcgatttctcgttcgagagatgcagcatttgaaaaagcggctatgtatggaacggggcctgggactacccaaatggagtttaccaaaggccttgctctgttatgtttttttagtttgatttctttcttgtctggtctgttcttatttcggctggggacgggggaaacaaggatgggactggaaaaatggtttcttatctgtcaactgggcgttttcctaatcggataccctctagacaatatttcggcctcacggcttttgtacaggagcaactcttaaaagctgcctgaaaaactgaaatgcaacatacgctttaattcaacagttttcttctgaaccattgtaactgtagactgtagactgtaaatgtacctctgtctgcctcgtacagtgccgacgtggccgctatgctgaattttcttcagtacatgtaaggaaaatgttcagaggatctcggttttgaataccagagaaccccttcaccgtatattccagccgacaaaccacttcaagacattcagatgctcaggagagcctaaatttttctcgacaccagcactccggacattgaaaataatacttagaatgccaatggctgaccgcattatcccacatttcaggttcgacccccatttccaagtacttgtcttcgtagccatcccagtactgtattcgtcgtgtgcgataccttaggcagtcgcagcaaaggccaatatttgcttcaggtcgaccggaattgtcacggggtgctattcgccttaggagagtgaatatatcaacacaggttgatggtggaagaaatctgtgcttgggtactgatggtatgcgaattcggacaagtgatgagacgtgtagcaggcgcttgcatgtcaacgcaaggcacattcgatccagatgttcacatttgttgaggatatcaacgattagttcgggaggtaagctaagtagattgcaggtgatttgtggttctgctacgaggatctgagagggattagatagtgaaggacccgtcaggaatttgagtcggtctagaagtgctcacgttggatggccgcttgaaacggtgccgacaagaatgagtggatgttggtaatgctgacatcgtatcgttatggtgggcaaattttcttgacgcgccagggtgtttgttgacttgacggcgcgaaggagcagagccgcaaaaggttaaatgcatggttctgtggggttgatgcctgaattatagaccgttcaagacatgattcgggacctgggtgcaagtttgacaactcttgattgatatatcacctactgtacacatcgtcatttcgtttaaacatattttgcattatcgaaatccctaattccctatacaagagccttagactaaccaactatgttacataacgtgttctaaacgcctccacgaaattcatgccgtcattgtcatcataagcagatgcaccggtatccaagtcgagcggcaatgaaacagcagtctcggagagcgttcgtaaatcaagtataggaatcattgaaggacggccgtgggcgcattgaaacgggaaggcacaatcggccagcctggagaccaaggcctggcaatcttcgatgttcaacgagtcattgaacatgatagcagtgcgacaggcccgggaatttaataggtccacgatgccttgagggcatccattcatatgttgaacccatgagcgcgaggcggacgattttagggttcctttgtgtacaacgtcatcgctgtctgatagttcgatatcctggtcggcatattccgtttcaaatgccttcttcgactggaacggcttcctaccatcttcctcacttgaccaaatctcacgcctcatcaagtcaatcaacacgcgaggctcgagccgacagcgttcggctattaggacagggacagtgtggacggtgatcgagacagtagatttggtttcgccttgtgtcacatactcaataccccaggccgagaagagagccatatatttttggaagaggtcaccctctgttgacgaaacttcgaatgctagagagccgacttggacagtccgcactcgacaactcgactccaaattctcacccagctcagcagagagaaacatctccttgaacaactgttcgattcggcatcgctcatcggccgcgtgctgatcgattaagagtagaacatcgtttgatgtctcctccaaattgggaatgacgggagtcgtgtggaccttagccaagatgaacttgttgtccacctgggctatcacttcggcagtctcgagcgcacggcgttgaagcttgcctcgatatttggcaacttgcgctgtatcaagcgatccaatgcctttgaagcagccgtgcgaagaagtaattacattctgctgaccgacggactctgcgcctagatttggtattggcatttctgttcggctgaaggaaggattgtcccatttccctaacagattttctatccaaaatgtttgcactggatgcttggacgaggcgttggcgcaatcggtggaagaccgatgggtagctaatgacttctgggcgtccatcgtttggcccgttcgagaattaatcatataggccatcttggtgtatggatcgatccagctgatcatcttgtctgatggcgagtctccaggcagatcctctgtcctgttcctgtcctcaccggagactcttttattcgggtggtttggaataattctgcactcctggccatcatttggatggtttgacttatggttagggaggatcggcaaggagctctcaccctgtattatattaggagccgcatgggaaagccgagatgtttgatgggttggagaacgtcctttgggacccttagcggcttttatcctggaccagttgtcgaagctttgaccagagtttagagactgtgctcttggaaaggaggggatttttagacgaccgctgaacacctcttcggtgctagaaatagaccgaccttgttgtagagggccacgagaaccacgagaactgccagctgctcgagaggctttggaacggatactctggttttggtgtgataaaatggtctgctgtttgcggttacgagggcggagattgtgttgcttcagaaactcatgaaccatggccccaagcacatcaactatacgctgaaccgatttggccgactctggaagattcacagacgcatcgtcgcccaatcgtataacagcgtttgtgtcaatgcgaatgtaaaacattggccacttattgacgggctttgcccagcttcgagtgcttgcgttacttggggcatcaagctgattcaacgaagatgagcttctgtgggaaatggctccaacattactgaaatcagactcagcaaatagccgatttacttcgtcataaagcacatttgtgctgttgcgcgataggatggggtctttccccaaagagatgaactgaaccttccgacttgggctgggttggagagatattgctccccgaactatcaggtcagaaaccgaggctgaaattgcatgccaagaatcgaagtttggtgatgtgatcagcccggattgtgtcagaattgacccgacacgtttgagatcaaaatccttctgagcatgaggaatgcacgcttcgggtatagaggtagttccaagacgaatagaaatccgtttatttcgttccacatcgaggaggactaattttgagaattgagggttggctaaaaggagagacaccaaagagttcctgagatggtcccactcccgttctagctcgtccggccgctgaagagtgagagctcgactcttgactcgaactggcatgttcccaaaaaggtcattgacagttatagatgtgccatggccggcaaagcgaagcacctggtgtggtggtgcaggggttagccgagccacaggtgtcgaatgatgaagtatgattgagtttgtgcatccatgatgaatgtgatgagaagtcacagtgagcagagacaccgaggccagggaagccaagaacaagccccgatggccatacaagccactcagctcgaatttggatgtatctatcgcatatgttagctagcataaataatcctaaggttgggagacatgcgatgaggtttgcctagccctccggtaacttcaaactcggccggagggattccatcaccatcatcttcaactatacagccaccacgcttgaaatcgacagtgacgaagacggtatgtgcattggcatccaaagaatttttgactagctccaaaatgacaccagtcagatgcaaaatggatgtagatgatttgatctttgcaaccacttcagaaggtagcgcttgtatcatagaccgagaaggaggcattgacgcagttgtattcaccggggcattgtgccactagatgcaagaaagatcccaaaatggatcctggaaacagtactataaatacgcatttcaatcatgatcacctgtcattgtcgctggtagaacctttccaataggtaccagtcaatgacttgcgaaaaataaaacgaccgaaatgttgagaatacgtcacacaatagaagtcgagaggcaatatcgaaggcaggcacatgacgtgcgcggataaacagtctccccgcccgctgccccatctgccgcggcgcgacttgatgcccagagctctacttactcccctgcctacctttgacatttcgcaagcaagagtggttagtgactaggctacctctccaagctagaatgactactgccgatggtcctgctagggtgcatggtaagtacatatgtacagattgtgcctgttggccaccgcgaacccctgctaagggattcatacaaaacagaccggaatgcacgtcgccgcccattctcgaactgggtgaaacgcctggcgaaccttaagagctcctctgattctacgacaaatcgatggaccaacaagcgctccacgggcaataagggcaagaaggccgaccaagaaaacaacccatacccgctctctggaatcatcaaccgtgacacagggactcagacaccgaccgactcatatacagatgatcattatggtacaacatctcgctccagaagcgacccatctttctgttcgggctatgagaacccggttcccctgacaagtgcaaaatcagctgcgccaactatttcaaccaacggcgatgccgcagtatccgaagcagcgtattccaaggctgggacattggcaactggcactgaaggattaagcagccatggagggggtgagggcagcaccttctcgtcgccggcaccttcaattcgatcgatgaccactaccctgaccactgtgcactcggcagcaccctcaacccaactgtacaatgcacaaaacagccacaatgggcaccaccatggcagctcagcacagagttcttcaaaccagcaggttcaattttcccaccaattcccttcaacctcacccgccactgcagtcccctcgcacctggcaccacaaagtcatgcgatgacgtacagcgctgcaaccgcgaacaatgctttgaccgataacgcttctcttctcaccttggcaagctcatccaagcgccgtcgccgcaactccctagataccaatgcgtctgtacgcgggttggctccgtcttctgttttcggcgggagtcgggagagcttgccgctgagtgttctgagtggaaatacgactgaagcatccaatacctcagtattcaatgcgtcgggggtactgagccgaccgagtattgttggccttgctagtgctgaacgcatcagtgtctactcggcctccggagcaattccgctagccaccactactgcggagcggggcggcttatacactactaagcaaaccgtcggcggtgatacggccagcattcgcagcgttgtccaatcgcacagccgacatgacagtactggtgccagtatctccgggggtattagcagtccatatgccgtggctggtcgcatgagtcgaagaagttctggctggggagaaattaccggcgaggaaggtaatgaaggaaagccagttgagaaaaacgaggatgaagccgcaattaaggatggtaacggctttcccgttgagcggcttaaggcatgattccacttcgcacgtaccggcataccttccagtaacgattgaacggtgaggtgtgcttgaatgaaattccggatggacatttcgaaagcttgagcgaagtatcagtgatccgctactacataatgacttgatgcatggcaatcttccaaggacttgggtattcttaatggtttggcggcgttttctaggcttggactttgataccctatgcggtatggacaaattatttctactcaatccatattgcatgcaactcagatctttcgtgtattcattagatctccctagagtccgcttcgggcgtttttatctctacctaccagttggccctcggacaccccttttcatcggcgccgaatgaccatgggcatatcgtactgatacacgaaccaggcattttgatagttccattcatgcttggggtcgaccaattgaatctataccgcgagttagcaccaaaaagctggaatccaacaaacgccaataaaccactcacatcgaacgaggtgtacagcgacgcgatcagctttttgatctccaacgtagcgagataccggcccatgcaaacccggcctccgccgccgaaagataagtcgacagtatccttcatccgacgcaggcgaacctcgaagttctccgggctttcgtccttgccctgcagccagcgatccggattgaagtcatccgcatcatccccgaacactccgaaatcacggttcgtgacaaaggggttaatcccgaccttagtacccgcggggagatatcgtccgtccggaagcgtgaatccaccctctggaacgatacgctcgaagatcatggcaataccagggttgacgcgcagggcttcacgaatgacggcatccaggtacggcaagtcgcggatctccttccagggagcgggggcagagataccggcggattgaagttcggcgacaagtctggccgtcgcagcaggtgatttggctaggtagtaaacggcagcacgcatggtggctgagcttgtgtcccctccagcgagaatgctcagcatcagccagttaacaatttggttgtcatcaacgagatcggggtacgtttctttcagctgcacatatttgtcgagcgtgtgatcgacagtaccggcggagatttttttctcagcaagctgggcctgatactcggcgacgactctgaaggcgtagaggacacctgtcaaggtgggcttgggcccaatgcgcttgattgggttcttgtcgaggaagttgtcaacccaggggatttgagagacctggtgggacgtatcagtcaccctccttgcttacgctgaatcattgatatcgcagttcttaccggtgcgaagtatctcaggccagcagtggagtctgtgatcaaattgtcgacatccttctcctggtcaatgaatccatagtgccgaccaaagctgtaattggcggtcacatcccaggcgactatgtgatgtgttagctgaaagctgcgcaggctgctagggggcatttgagagctcacagaaaccaatccattcatctgccgggcaaacctttcctgcgttatcaccatcgacaaatctcagcgcaagcttgtccacaaactttgttattgtttcatcgatgaaaggctcgtattccagaaccttagtcatggtccacaggccccggataggtcggatgttctggttatgccaatcttcatcctgggtgttgaagagattcgacattcgatggccttcaatcagtacatcattggggcggtacatatcactctttactcatggttacgactggtcagcatggcctattctcacatctaaaaggacggcattgactaggagacgatatatccaacctttttccatggattgcgagtggaataaattgtccgaattagattcgggtctgatatgctcacgcaattgggcccgacctgcaccgctgtgccatatttccgatgtaattgaacattcttcagatcaatacgtccgccatatgcatgagccgcacgccaaacatcagtgatcttcgccaacgccgggccagggatggatttcaaacgcgaaaagaacacatctgaaatcaactttgtcacaacaagcaaacccagagtggccaaggcctgggcccacaggctggaaggaagagagatcatgtccaacgtgtataatgtgcgcgcacggaagtcagtgcagtgcagtgcagcaaggggattccgagtccaattcactgccaatagttagactttcgagaagtgcaacacagtcggcagttgcagcttttcaatgcccctcgaagcccctaacccctagggctgctgagataacggcaggacgcgatttgtccatttttcaacacgagcggggttctttgcgggaaacaagtgaaagacgcgaagaagcgccaatgattctccaatgatatggaaattatatccaagtgggctttagctttcgtattctggcgcgggtggacggaatgtggagtcggtgattgattgtcgacggctatgaatggctcttcgatgacccgactttcccaatgcggctatgataaccttggctctagagcggttctgccctagcgcccggaagagataccatggatctgtaacagcctctcgttattgtgatagatccaccgccgccactaccattgtaaccgagtcaatgcacaatggcatacttgttcgtaccgggaaggcggcccaagttgaccgatcgcatcgctttgagatccacttgggaagtatgagtcccacttgctgtgacaataattaactttttcagacttcgcccctgtcgtatttcatattgtcgggacgttttagtttccgagatatgacaccctgttgacaatgcccatgcgcttgaaataatccgtggtgtgtccacatctggggacgttggatctttaaaccgacgggtataccccggactgtctgcacagcattggtgaatactcagaatgtcgtctagcgggggtgcatctctcctaccggagagccaggctcctacagtgaagggtgtgatgtggacgatgtcgatggttcctttggtcttcgttttcctgcgcttgtatgtgcgagtatacatgcggagagtgtttggctgggatgacggcattgcaatcgcggcaattgtaagggactccttttcgtgactgactgacttggatgatcttgctaacttcaattcccttggtagggttgtctgattggatacgctgctgtctcccatgtcgctgcaaacctgggattagggcaacaccttgaaattgtccagaaaaaccccgataacctcatccaggtggcgctcttatgcaacattggcgaatctctggcaatcattgcatgcaccctcggcaagacgtcctttgctgtcacattgcttcggatcgtggtccgcagatggatggttattttgctatggttcgtgattgttacaatgaacattgtcaacatcttggctgcgctctttgtcttcctgcaatgcaaagatcctcggcatctgtggaatccgatgatcccatcggagtgttggccgtcgcatatctttacgcatttctctctctttgttggtggtgagtctgctcgcagaagtctgctttggttgtgattgacgactaacacgtaaactccctcagcttattctggagcacaagatttcgtcctagccctgctaccatggacgattgtgtggaatttgcaaatgaagaagaaggaaaagcttggtgtggtcgttgcaatgagtcttggaatcttgtaagtccttgggcggaagcccttgcaaacctcgaaccgtcccacatgctgattgacttatctcttcaagtgcaggcgcagcatccatagtcaagaccatccacctcgtggccctctcagccaaatccgacttcacatgtacgccaccattgttaccttcttcgtctcttgtcaggactaatttgctttctttgcttaggggaactcgctcccttattaatctgggcagcagttgaagacggtctcgctatcaccgctgcatctattcccgcgcttaagcctctcttgacaaggatgttccccagcacatcagcggacagttataacatgatcgcgtatccaaaacagccccccagccgcaagatattcgacaactcccagggcgaaacgcagacggatattggacacacgagtgttcatgacacgggaagtcaaacagcgatcctagagcctatcgttccaaagggcgaaaatatcaatatgataaccgaggtgtcggtgacctataatcacggctcgtgaaggactttgagacagaagaatcaccacaagcaacgggaagcggtcgaccttaacatgcgaatataattactctcaatagacgatttcatctggatttcatgaccatagaccctaattgtttgtctcaagtcgtaaccccgttcgtggtgcgagaaggtcagggtaaatctcgtggccctgtatgatttgtttatacccacttcgagtatctcacttgacagtaatctgagatgttgaatttaatggaagatttcttcgggaatgaaagatgagagatctgggagaggcctaaacagtgcaacgtgatatgccaaatatataacacgtggagaaagacctagttacaatagttggaaaaagtcactcaagaggaaaatatttagtctgctggtgctctccctaacagtagaaagtcgaccgtgattatttccccctctgcatcgttactatccccgtctccaaagtatctcgtggttgcttagtttcaaaccagaagctgcccagaactaaatagcgacgacttggtggggaccgtaccaagcccggtcgaccgcatgtaacaagctctgtcattaccgtctgttttccacatgaatcgcacacacttcttagcgcccttgtagttggcgcacttctcagcgcagtccttgaaagagttcgccctgccagtacccaagtctgctggtccggggtcatcaactttccagaagttagcatggcatgtccctactatgagattttatagggtagacaaacgcttagcatagtgaatcttgaatttctcgtttccagccgtgatgatgcattgatcgtcgcgaagctctgtgactcagtggtcagtatcggttgagcagtgaaatgcgataccgcgggagtcattgaattttattacttaccggcgtcgaaaaggtttgtgcggcattttccatcggcgccttctccgttgcaattaacattgagagcatcatacgactgctggagtgtgtctagtttgcctttgagcgatgtgatctgcgagttgagggcggtgatctcatcatttttattggtgagatccagagccaatttgttcttgtcgttctcgcactgctgcttctggatgctgaggtcgcccttttctgattcacacttatgttgctccgcacgacattcttttttcttctcttcaatttcaccagagtggcgacggcagtcctcttcggcactctgggccgtcagcttgtccgcttcgcattgcgccaatttcgctggatccacctggtttgtttgacatatttcgaggttgtgcttagcttgctctaggtcattttgacaggtgtccttgctattgtcgcactccttcttatcctgaaggcactgttccttctctttggcgcattgttccttctcctccacgtacttttcgcactgcggttcgggagtcggggggtcgatattctcgattttaacgattgacataaacttggttgcctgctgttgatctttattgctgctaaggacgaagaagcagttgccggctttgtgatcacccagtgttctgaaggaaattgcctcgcagtcctctgacgcgcagagcgaagcacattcgagggcattggccgccggcctgctgattttattcagcgaagacaggatagtcttgcaagtccatttccaacggccattaccaataacaacctcgtcttcttgcttgtctggattagagcagcatgcgttacgatcatccgactccaaacaggatggaaatacctccgtaaaggtaatccactcttcatcggacctctgatccaggttgtctcctaggacaaagaagcagttgtttccgcggggtggcttgccgtgtgccttgaaagatgatgcttcacaggacaggtcatctgcacagagtgatgcacactcgtgggcattgctgactttttgggctgttttgggattgagagaccccaaggccgatccgcaagtgaacttgaaggtgcggtcatcaattgtcacctcaccagtgggagtgggcgcaccactggtacagcagtcattaggagtagctgaggacaggcataccgagccgacgccgattgggatttggttggcgaaggccgaagccgcgcctagcagcaagaggaatgatttggcagtcatcgtcaatcaagaaacaaaagaaagaactgtctctggttgtcgcagaaaggcaagaggaattgcaggtgctcaaagcttgaataaatagcatagcgacacggccaggtcctccacaaccccttttctctcccccgcgttatagccccactttgatattaagacatgatgcaaagtactactccataagcgatcattaaggagagaagaggtgtcaaaatcatagatcgagtgataagttacattggtggacctggaagtgggtagctggagtgggtagctggagtgggtagctggagtgggtagctaggactctgggatggccagatgattcggttcagctcagcttctgcaggatgtggagctggaaaattgcagatccccagaaagcctaaaaggagaagataagccaactgcggaacgaatgaaaaatcggtaaatggccaattttatgcaggcaacaaaagccaatataagcaaagtcgtccgtggtcgctagttcgatgtgatcgaccgctgttatggaagaaacatctaagaatatcgatttgctgggcactgcctataaaaagccctaataccgccttccggatccgtcacgcggagtccactttctaatttccggcccgttccgcggggaaccggtgggtcgagccttccaacttatcaataacgtcatgccagggagtacgtacagctcccgtcagatagatgcactcaacaggagaacgctataggctgaccttgtgcagcatcggagtgagccaatcagttgccaatggtgcagcagatggctcagctgaaggcggcctgtcctagctgagccaacctgcagaaactagtgtcgctttgagattttcccaatggcgcagctgccgtgcaaccctcctgatcccgtcccctggagaaactatgtcacattggagtcaccctttcgtcccatgatggataggccaggtcgccccccttgtgctgacgtcactttcattaaggttcatggtcgcgtattggctcacaatctgtcggtatctttttggagggcaattgctgggtgatacatctcctgtatttacagaattgagctgaactgacaggcattacgcgtcaacggacgcgatggggctgcctgaaagcggcagacaagaagggggtgtcttcccctccacctaaggatataagtacgacttgaatcgatgaatcgtgaccttcatccttttcccaaagcaatttggtctaccttagctcagcaataactcaagtgactcgcgacagagatcttcataatgacggcaaaccttcacactcatgcgaagagcggaactctaaatctgaagaacattgtccaattccttatccaggtagaagtcaatgacgaagatagctatggtgatacggcccttgacttggcaattcgaaacggccatgttggtgctgtaaagctgcttttgcagaacgatgcggatgccaacagagtatcttcggatggcaagacccccctctatgcggccacgcaggcaccaaacagcggtcgcattgtcgagcttctgctcaagcacggcgccaagcctgatgagccggtctcacagcagaaaggtgacaccccgttgatgtcggcaattcgactaggcactagccccgaggccatccgtgccctcatcgaggctggagcagccatggataggccaaatgaccttggagaaacgcctgcgagccttgctgaaaagtctaccaacaccgctgtctccaaggctattcgtcccaaggacgataagccagcgtggaagcctgagctagagaatcttctcgttagctccggtcttttcgccctggcatacttcaaaaacttcaaggacgtcggcataaacgccataaatcgtgttgctgcattggcggagccattgccaggcgtatgtatcttgtcatcgacattctctcatttctaaatttgcctaatcccgaaatagcaaactacgtatccccgcacggtggaagagttcaagtcaaaccttcataaattaatcaagaaaaagggtcttgaggacttctacccagagggcaatgaatacgtggccaaggtagcggagaacgcattcaagatcctgaacgattcaaccatcccgggtgcaacacccaagaatgtgaccatcatgtcccacctggcgttgtatcagcctattctatactgcggtaagccaaagtcatcacatcgcatatgaacaccatgcttatactcgttgcctctagatgatagtggctcgatggatactgacaaccgcatgagccttcaggcagccatggttgaaaatatggcacatctcatcacggcggctgctaccgaggatcaaaggcttgttcatcttcgcttcatcaataaggacgacaaatttgataatctcaaccccaacgagctttccttgaagatgaatttctccccaacaggatcgactagactgggctcgaacctgaaagataaagtcttggatgactttctctatggcccaattaacaagggctatgtgctctcgcggccccttcttatcctgaccgtcaccgatggagctccaaacagtgaagatcctgatgcatacgaaaatgaagtcagggcatctctgaactttgtgaaggccaacggatacggagacgaaggtaagctttggtcgtagttctacgtcgacgataccgctaaccctgcatagccgtccgttatgaccttagccaggtgggcaacgcgcctgaggctactgcatttttggaaagctgggagatgaatgatcttgtccccaacaggatcaacgtgactgctggtaagtgataactgaagtaaattagaagtaacatggatcagtctaactttcaaatacagaacatttggatgcccagttcgagaacttgagagacaaccaggctgatctcaataattgggtacgtcttcccgggtgttctattggattttgacgcactactgacgagttcattttagctcctggagagactcgaagagctggtcaaatattagatagtgtcttgcagatggaaatgaaaggtctcttgactctcattgcgatttttgtattcattgcaggaaatttgaaaaagaaaaagtatccaatctccccaacaactaggagtgaagcaatatgcggccacaactagatatataccggagcgagttgaataagtggtacttagaagcaacaatgaataattaagtaaaaagaatgactgagtctgttcaagctagacagtgtgccacggactagaactgcttcgtcgagatatcacactgttggtggctagctggggtgggtccgtagatctgaactttaactacctactccgtacctatccttgcgtcaagaacaggagaacaatatttgatctacaatgtagtatcgaagtcgaaatgcgatagcgtattctcgggggaccgttacgtcccaagtctaattaccaaggtggccgtaggctgatctcgaaaaatcgatatgacactatcattttcaccagattgtggaggtggagtactacttcacatacatgggaccatggattcgaggtgccttccaggccacagttcaacccaagctcattccttcaattgtggcaatcttccatccttcgttggtgtcatattgctgatctagctcgagcagcaagtccagcagggctattcaacagattagtatcaagccgaaggataattggagtggacacatacttcatcatcgacgtcgagctgtgtagacacccaaccgccctggcagggataagggtcatcacggcaggtagtcaggcaggtagggtcatcatcggaagtggcatccttggcccaagcactagagacagccaacgcgagagtggcaaataggaaggttgagaactgcatcgtgacgggttgtttaaggtcaaaattgttttggtcaagtaggagaagatgtaagtagacaaggtaatggagtgagtcgtgactgtagaggttatttatatgagcttcatatccatcctccagcttcagctgtgctgtaatttctctagccatagatgcatgatgtataagacttagctattgagaaatgtgggccagcgctagcaacattctccaataaaccgtatgctttccacgtaaggaactggggccttttttcagtgtagctgaatatttggacaaggtcggtcaataaaaacttaaaggtgcattgcataggtctctatatcgctctcgactgattggtcctaccaagatgcacgataaatagatctacggctcaagttgcaccgcatgtaggtatgatgacgatcgaatgctgcaaggtcgcctcttgccccattccgttcacggtggaccgttccgtgccgtgcaaccctttttctttcatttttagggccctgcacagcactggggtaccctcgtcattgaaaattctacgcaaggtttggggccactccgttctgcgttctactacacccttgatgttggggatcgccatgaaaatccatggttatactacatagaaaaaccacaaacttaatccttttggcttttaccgcggcgtaccccggaaggaagggaagatatccataaaatatacatttaagaagatcaccgaagtgactaaaatgactaccgaaattacatgacatgacacggccggcttactatacttgtgattcataatttcggaagcgatcatcaccacatatttcaacccacatcttataccagtggtatccacggttctagatgggcaaaacccttagacataaccgcatgcgcgtgtcagttacccacacagtactcggatcaatgtccaacaatagaaatctcttagtagaatgccgtaacaacatagtttggtctcgaccgaggaaaaccgggctagtacttgtgtatagagtttcttctttgctgttaccggaatatgatcaagtttaatgctcaagtgaaggagaagaatggcgtaatcaggtcatgttccaaggtttgctaactacatagttaccgacagagcacccaactatctaccagcaaaggttaaaggccaaaaaaatcccagcagcacagcatatcattgtcaagtggacgtatgtggacaaactaatgtacccgcttatttgcaaagagtgtcctgcattccagaaatggaaggagcgaagaagtactcaccaccgcgagggatgacccagcgttcgatgggaatgtagtgcttgttcggggttggcacgggcttctcaacatcgggaaagtttgcaacaggggctgggtgctcgtatttggtaacatcgtcctccgcgcggtagtcgggaggcatttggccgatgatagcgtcgataccctggggcgcgatatttcccatcttggcagtgaaatcaacaggtttatcctccttgtttgcccattctgcagagctgttagtcctcaacgtggttgtaaatttagcgagaatacagacctttctggacaaatcggaatccgttggtgatgctgctctggtaggaaacaaacaacagaccacgatcatgctgggacacaccgccggccttctcattgttcagtgtcagtggtccgtagggaattccccgtcgcaacataagatgcttctcgtaattggggaagtcatctcgaggcccacacttccggatgtgggcagcgtaaggacatttggtttggtcctcagggttgtaagtgaaggcatccgtgtgatttatctgttccagctttttaaattccgcttcggggtctttattctcctttttccactgtgtgaacaacttcttcttgttctcgataggatcggggttcaacataggcgatggatcttggtctgggtaaagttcaagcggggctcctgtacatatcaaataagtgaatgctgcaagtaaaggaatacacagcaagcagacgatcttaccgttgggccatcgtccaacaacacgggaggagaatttgcgaagctctgctgcagatcgttcgttaatgccctcagcgaccactttcttagtgttgcgggcacaccaactgaaagtgacatgttaagaatattgtagcagaagaaagccaaagaggacacgtacgcgacgaactcgggtgttctctgttcgtatgtgcggaacaccatgaagcttccctcgttggcccaagctgggtgattcccttgatcgccttcgcctccaacaagaatagcactaaagaggtcgtcagcgactaaattcactgacacttggtgtaaaaagtctagagcttacccagcctgaattggcttcaaacccttcttggcttcttcgacctttgcatcggtgtctagaccaatgacaactggctgggagataccatcaacccatccaaagctaaaccgtagatgttagtcttgcaggatttatgcaatgcgcctgaagtatcatactgttctctgtcatcatcaaggacatgtccctgctgccggaagacaagttggatacttggctttggcttgtcgacctcgagaccaacttcgaaagtctgctcaaccattttgatggtatcgactaatgtcttctcactttcaccggttatagtgaagacaccgtcgaggtatccagatcgtggggtgaattggtggaaccaatcatgctggtcatcgagaccgttatgctttttcttgtcatctccctcaagggggtaggtcatatcctcccactggccgttgttgaagacatcatcggtgaatgcctcggctccaagctggcatggtttagcacgctcttataatcaccgggtagtctcataactcacctttgctagacctttggcagagaaggcaacattgatggcagacatatggacgagacctttgagagtaccctcttccttcttctggtagattccttttctgaatctctcagcatcgcgggcagtcgtcagattaggaataagggcggccaagtgtttcttgaacagctcagggttagtgatgcggaagaagacaaaaagctcgtgcttcttggacagacggggcctggaattattagaatcaaatccgaaactggaataccaagaagggtattgacttaccagatgtctccctggatgttcttcttgttggggggtgccattttaacgactaggtcaattgtttccagttgcagtcgttctaggaaaagacttttgaggggtgaaggggcgagggatatgcagagctttcttataattttagctacaccatacaatggctaatgcttggaaatcgggcgaggtcgagacgtaagagcatgccgcggccaagcatcaatgatgctgctactacatactccacgtagcatgagctgcaagcagattgttctttcgtatccatctacgacatagatagactaatcacattccgtgatgtaaggtggctgtcccgagaattactgtacaaccatgcgatacaaatcgagaatatcactgtaccagctgacattgtcccatctaccgtggctgcctgtgaaagagaccagaatgacgtgtttagatagaaggagtcgatccattccccaacggagcggtccgagtttatgtagtgctccacattgttgcaataggcatacattgatgcatcgctggagacatggaagtgagatattcgcagctttggtatggtagagatactgtacacgatcctggcatatgcagtctggatactacattatctcctctgattggaatgcgacccaaccacgtctagtgcctggagtgcactaaaaactatctggcctgaaacgtgcatctcctagctattacggtatatcacatgtacctagctagcacctatcacctttcaattattatcaattgagcaactgcagatccagatcggccaaaatcatgcagcgaatacataatgtgacttcactacgccaatcgagatctgctgattctcaccgccaccaagtgaaaatgaatcgatcgaaaagtaaaaagataaatgcagacacatagcgggtctcggtgtagctactggatatgaacatgaagaaatatagaactgaaaataggtaataaagttcaatgacgcctaaaaaagtgagaattatctacgcctagagctagaagatacctagtagatttgccctgcaagatactgatcgacaaccgtatcggtgctgagaaactatgccagatactcaccgtaaatctctcccggaggatcaaatttgatcaactcacggtcgaggtactggattggacgagtcgagtcgggtcaggctggcgcatgatacagttgaatgaaaagagctggagagtagttggtggccttgggccgatagttaggcattctaggtatctaatactcgatagacgaaaagagcaaatagtaaccaggcaaaccacttagttactcacccataaacatggtcaaagctatatcaccaagacagcgggatctgatacttctcccaattaccaggagtatcagcgtccctgaacttctcaattccaccagcaaccccattctcatccacttcccaatctcccatttcaaccctctctgcccaattcaacagcaccttgtaaagctgagcaccatgagtttctcgaatcccattccaaccacagacttgataaagtttatgaggataatctatcagtttatgactggcatataatccaatctgctccctaatagtatctcgggcgtatcctatagacccgatgcgactggtaagaagcagtctggacatattcccggagtcctgcattctgcccttgttaatttcttccgtgtataaaccagcagggatatcaatattatccaaagcccggccccagggtgatagattggacccatctgctcggactaggagaaatggcatttcttcgtcgttagcctcatcgtcattttcatccggttcaccttgacctatagtacgacaggctacaaagggctgggttttcaattcagcaacagactgtatccgggttcccggagcaatgtagcggaaatgaatctggcgcacaggaagcgcggagcaaaagcttcatcaagtaccgactctagaaattagacatcgacccgggctaattgaaccgggagtagagtttcaattgacgtgagtgaacgcagcaatggatttatcgatatcccgcagcgtatattgacaatactcctatgggaaactggagtaagtggtcgctgatttgtagcccactcagaaaataaaaaaagtgaaagccaggatcctcgtgtgaccatcccctcgatggagtggatctagctgaacgaagagactgggcgggtttaggagttaagcacgagtcaaggctgactggggggtattcttcccatcatgtcgtggatgggagcggagaaatgaccggcgccggtccatgcatattgcagaatttgattgtgaagctcggcggatcgctgagggtcgaaagtggactcggacatagaaggactagctcagggggaaagcaattgcagcgtatgttgtcaaagcgaaaacaaatccgagatttgggtggattgccttagcgtctttcggggtctgatctcgctcattctagaggataagtcagggctcaaaccccatgcgtgatgtaacaagtttgggtatggagttatatggcatggaataaattgcttcaggtagctgactgaatataaagcagaattatagtttagttgcattcagttgcatgtcttgggcagtacttaggagaccaaaggggaaggaggataatggccgaggtctgcggaggagtagacggtgtcggtttagaccgtattgaagggtctgtatccgctcttctacatatatatcgccaaaaagaaatttaaatgcccttgcacagctagtagtcttctcccagcgcatttgaaataataaaccagtccgttcttcaatagtcaaagaacggagtgaacagcaggataagagttgaaatgaggtgtgttgatgagtaattcggagcatccgacgctgacaaagctggcaaggaccaccaatcaccggttgcaaaccccgatttcggggtttcggtatccgtttttgtgtgggagccgcgtttgtcgcaggatttgttgcaaggtcgagagaaaggagggattgggtaatagttgcatgattcatgaggcgggattcgtgattcctgcagcattcatctcataccatacaatgttggaggctataatatctacaaggaccgatcatcgtggagttgcctaattggaaaatgggaacgtggaaccgaggattagactcggcaggctccgatggtcggccttcgatcgactcgtttcgataacattgtagaccagatttgcagagggtgtgggaaggaataatagggtaggatgagctggacgagaaaggcaatgtacaggtataagtagggaatattcacaagcgacacgagatccttagtatccgaatcgggaggcgaatgaaggcaaaacggaggcaaacccgagggattaatcatcatccacccctccggcccccgggcttccccccactgaagattcaaagaaaaaaacccacttgtggccccgacttctctctccttctctctctccggattccatcttacaacatcgccaaaatcacgattcccacgaatcgaacccaagtcacctcgcaacaggttcgacatcaatcgcatccgcgacaaatccgcaccgagccgcattcggcatttgagtcacgtctctcccgtccgcgcaacgcgcattttcaccgtccatcggcatcgagaaaatcggtttccggctcctgccttaattgatcctacgggtaaacgggaaagccttcataatggccaactacaatgggcgtcgcatgcccaacttctcgcaatacctcgatgacttgaacgcaattccatcgccgtatgaccaggcccagcagcagcaacagcagcagactaccttcaacgacgaggacctagctctgttcaccaacaccgagttcttcgagttcgacaagttcaccgacttcaacggtctgccttcgttctcggcagaagatgacaagacacacgaggctgtctccgatcaatctgcgcagaatgtggatctgaagttcttggatttcttgaatggtaagtgtggctgatttcggtttctgtttttcgcatcgctggttggttagtcctgagtctcagctgcatggctttcccctgatcacaccatactccgcggacttgttcacaattgtgtctattggaccaatgtctacaacatgcatattgtttcattggttgcctcatgaattcgtcattcatgcctattgcacgagtccatcgttttggggtcgttttggcatttatggcggttcatgcgcttcctaccctcaatatcatcccacatccttccacagctttgacctccttggctggatttttgaaccctgcatatcatccttcccgtggccctagcagggttttcttccactcaaatttgactttggtcgttggcgttaatgctctccgctattacgccattccacgtgatacaaacccctgctcagactctaactactgctcggacccccactactcttcgggaaatcgaaacccgcgatgtggatgttttgaaattgaatcaatgctaacggctttacagcagagggtctcaatggcattaccgatttccagcccgacctgactggctccaacgtccaggtgcccatgcacaatgcccacttccctgcggttccgtccgttcctagtgggcctgtggctgcgagccaggcacccctgcagcctgcgcctattcacaccgctccgaaggtcgctcaaactccatcctctgtttctatgtcgccttccactccggttaccggcaccaagcgcaagaactcagcacactcgagccaggagagtgctgaggaggctagtcgccaaatggccgaggaggataagcgccgtcgcaacaccgccgccagtgctcgcttccgtgtgaagaagaagcagcgtgaggctgctctcgagcagaccgtcaaagagaccaccgacaagaacgacattcttgaggcccgcgtgtctcagctcgagctggagaaccactggctccgtggtctgatcatggagaagaatggtgccgacgagcagtctgagcaagacatctcgaacatgttcaagaagttcttggcctcacagaaggccgatgaatcaagtatttccgacctgaagcgcggtgtgggcactaccgtatgaaccattgcctaatattaaaagaggaagaaaaaaaaccggcaaaaataaaaaaaaaaagaaaccccagtcttatttgattgccctgctactctactctgctgcttcaggtggtgaatgtcctgggcttttgcttgttagctccatctcaccatctttgccttcttgttcatagtgttctttttccagcgatgttgttttccttgtttctagcagccagagctacttcagattttatctgcaggcccagggggtggtgggtggatgagtgatgtctctcatgcagttacaagaattctagatgcaagttttcatgtctttcagctcggtttacgcctgtccgacttgcgtagattatccgttttaactaaacaccaaataacctttgcttcaatctacatacttaaatgtttccaccctcgaccggcctcgctcggcaatggtaccgactggccgctatacaccttcgtaaacggactgatccacccagcaagctccacaacacccggctctgcaaattcgacaaaaaggcgtggatcatctactcccatcccccgatatatccagaaatgctagaattcctgaaacgcaccctacgcaaatctcgcggaaacgtgtacggtctagaccatgcggtcctcaacatacagctcccacagcagagtatgtggatgaacatgggctactgggaagtgagtccactcaattaaataattgtctggtttgaatccacattgacccgcttactagtatacaaatgacttcccagaagcctgccaagcgcttctagaccaggtcctcacagctgcgctaacaacggagaaggcatctgccgtgagcatcgtggatgtcgggtgtgggtgtggtgatcagtcgttatacatggcgaagtttttcaattgctcttcttctacagcccagtccgatcctgaaactgggactaggacagcaacctctgccccaagctccagtacccagtcagacatccaagcatcagagtcaggcctgcggtctcgccatagcaagaccaagccgcaatccccctctcagccacgcctagattcctatatcgggatcacgctggaacccgcacaggccgcgctcggctcacgtcgtatccatgatctgcagcgaaagagtgaaagctctttccaggcagatatcttctgcgcagacgccgcagtacccagctcttggactggggatttgaagaaatcaatcacggcgcttgaggacgcgtccagtaaccaaaatgaaaatgacaatgataacacgtctacatggctcctggccctagacacattctatcacttccgcccctcgcgtctccctctcctaggctatgcacacgacaacctcaatgcctcgttcatggcttttgacttgatactatctgacagtataacctggtacgaaagtatcctcctccgattggtgtgctggggcacgaactcgccgtttgggaattttgtttgcgagaaggaatatgtggagctacttgttacggctgggtataatcctgcttctgttcagatccgggatatctcgcagcacacttttggggggttggcggatttcattaagcgcagggctgaggaggcgaggccgtttgggatcaagctggggaagttccgtgcggcgagttttgtttttgcgtggtgggctaagaggagggttgttaggggtgttgttgttgttgcgaggaggtaatgaggggttggatggtgggtatgttgtcttgtgtagcagtattgtgagccgctatcgagaggagggtgttcggtattcatctaggcagcctttacttcaaaagtgtatgcctatcgatctacaaggcaagctaagttgtacatatcatgaaaaccaaacaatatcaatggctctgatatctacaagcttatatgttacataacctatattacagtaatactagggacctcgaccgtctaaggccttcagatagttgttgcagagcgaagcgactgattccaactcctaatgctacgcaaagcccccctcttactggcttattctccccctgcctataatttcagtaccgccttcacaattaggcatatttcctgccatgtggtagtagtaagacagtaggtacctacaacttatatataaaccactgataaaattaagtcccctttgtgatatcattattaactgcttgatcaactgctttatcgtcaactacttaagtgaccactttagcaaccgcttgaaaaaatgcttgagaaactgctttagtaactaatctatgaaaagacatgcacacaaggttatttaattgcttcgcttcgctccgcaatcatgtgactttccaatcctttttctcccaaataggcttaggccaggtactctaattcccttttccccacatagaacggggcccgtagtatgtatacaccttcccgaatgaactcattgttgattctcatcagattttcttagtctattgtctggtacaagctttgactattgaaccccggaaacatggatctgtccgagagatatccaccaagtatgctattggctgaagtcgccaagaagctgcacgatcatcacagtgaacttcgcgtctcccttacctccaatcacccgctgtgcgtagaagctctcgctgcaagtctggattgtgtgtatggcattccggaacgcattttctaccaaccacgaatccacaccgacgtgcagctttacgacaaagtgccctcgaaaatatcagtttggagaacaacccccccacagcattaagccgacgtattcgaaccacgggcaggctcgaatacgcaggttttccagagccgctctctcgcgaacaccatgccgcgttgaagaagaaggccgaaaacatgcctccaccgcgagcttctgttctcgaaatccgcgctttgcgcacagagaatacgcccgtatctattgtcgagaactcaacaatcagtgctgtcgattgggatgtgggtatgccgcaatgccacctcgatggagttgaaatgatctgggacactggtgctaccgccactatcatcacgaagatatctgaagtcaagatttccaagcccatctgtcagattcaatccatatgccgtacaccaattcgagcggcactcgcgtccagctttccttcgccgtcgagtttaccaacacgctttttacaatgaccgtgatcgcatgggtcgtggataaagaagcaatcccaaatttccggtcaggcatgatcctgggacaaagggattgcatcgatgccatccagtatagatctatcccgcgatcaattcttgaggccagaggggagtcggttgatgaaaagttctggggggatctcattctagagagctatgttgattttgacggaagcttaaaggagatcgtttagctttgcttgtcctgtattctgattttcctgccctgacgtcgctttctttatcaaagacaccgagagattttcatgtattattagccttcaagacatcgacctcgggtaaggaagacacttcgggagtttcatgtattattaaccttcaagatccatggatttataactatgggctgagtgtgctttctatctcccttttctgtatgttagaaaagctcatatgctggggaggagactcgttgtgcccattctctctggaaaggtcttgctaggtccggtataaaagtctgctttaatgctacaatatctcaagtatacttctataagcggtatagtttcgtgatcggcgtcccttgtgttgttatcactcatcctagtatcccgagtatcatacaatggctccattgtatcgctgttcaggcaaacgcctcccagcaagttgttagccctgctgaacacgcaaaattagcgagcgcagtacatgccacgttacaaaccgaattaagagccttcagcacactgcctagaggctaagctcgcagtctcgagtgtcaggtgaagtataaacggtacaccgatggattaggcagcttcgacgctttctacgccgtagttactctagagtctgttctccccagcagagttcttgtctaagtatgataagaatgagtaagtatgtcaaaagtctcctggatcgatcattgcgcatattcgcctcgctctctatccgcagtgctttctgcggcaaggccgtgcctattctttgacagattgtgtatgtttgaaaataaagctattcatatagtataaaactgtagcttgccccattctagatattcccactatatttatctaagtctaggtggtttgaagatgttccgaccgtacaagtctgtatgtttcttaacattgaaggcactcctaccatataaatctgtattcggatttgtatgttttttgatattgagctattcacaatgaaccgtgctcactagcgcattcaacaaattgcacccaggagccccacaggaccccctagtcttcctacgttgtacaccagcagcttgtagaatattccaagcgccagtgatgtggagacctaacgacactacatggcgcgctgatgtatctaaatgatacttcggatgaagttcttggcaggcaagcaatctccagaatcttctattcaattctcaggggaagttcaatttagtgaaaagaagttagccaaagaatgttgggtaccatcgggcgcaattgtcagtcctggcgttatgactcttatgagctctaggtttcagaaaatcgcttgttgcgtaatgacttgtatgaccctgctcttgaaaggggaaaattcctcgggtttggacgttgtggaaggttatatacaacaaagaagacgattctaaatgaattcagcaagaatggccgctccaatatcatcaacaactctcctaatcgctttcttttcagtctatatttctatattatagggacctcgggagtgggaagtggatattttatagtactagcttgtgggtttgtgggtcgccatagatgcccaacctccactcctgccctggaggatacagtttacaccaagggtatgtgctgcttttgggtgaagaaacttcgctctactatccgaggcctagtccggactctatactagattataaggtctttctaggccaaagcacatgcaagccacccgagcccgtggcggcctgactcatgatgacgtaaagaggcggtgactggcaccacctgatatctgggcacatgactcaagggggattcatttctgagaaggaatgttgtatacttgctcattcttattggcagtcaatctaaattataatccagctcactgtatcgtctttgttcattgctaattgctaattgctgagtagtctgactggccttccaagaatgctcaatatgtttcaggcaactagttcggcagttatccaaggctgaagccgctaagtggtgggtctagacgatcacatttgctttcggcgctcctttcttttggtttttttttttcgggcttgtttttataaacaaatcgcccgcgcttgatggcgaaaaaagcttttcccctatatattccaggcacctgatacttttctggtctgacagtcccaacagggaaaaagatactgcagccaagaagatctacaagatcgtccagattatacccgtgaagcggtcacccttggcaatatggatgatcagctgcctgtgattgaatcgcatctatcaagcgaaaagccacggacctcggctgagatagagagacggatcacatcaaactctatcggatcgtcgactggctcaagcagctcctttgaatatgacccacagattcataggctgcaatcgcggaatacagagctggacttggaacgccatcgcactggcacgtcgcgagcattgagcaggactgagacgcaacgcgctcaacatgcgctcactgtgggcgagagtcttcgatcgcgaccatcacggactccattgccagctttcggtggaggcaagccctaccctccacctctccctgaacgggaggattacgttgtggagtttgatgggccagatgacccattatacccactgaactggtctgtgaaaaagaagtgagtttcaccatgtctataccgtactgcgtatctagcgtgcagcgttcttactaacttttgcaatccagatgttacatcagtgccatgctcgccttcaccagtatttgttccaccttcgattccgccgtttttagtgcttcatcgagtaatgtttcaaaacacttcggcgtcagtctcgaagtcgccatcctctccagctctctatacatcgtcggctacgcctcaggtcccttggtatgggctcccctatccgaactccagggccgtcgaatccccattctcatcgccatgttcggatttggcgtgttcaatatcggagtggcagtcgccaaagatttgcagacactcatgatctgccggttcttctgtggtatgttcggcagttgtcccttggcagtcgtggctgctgtattctctgatatctgggacaaccgcacccgtggtgttgccattgccatattctcctcaacggtgttcctgggccctctcgtggcacctttcatcggaggcttcattaacatgtcatatctcggctggcgctggaccgcctatatccccgcgattatgggcttttccgctttcatcatgaatcttttcttcctgagggagtcatacccacctgttgtgcttgtggctaaggccgcggagctacgtcgtcggactaagaactggggaattcatgcaaagcaagaggagatcgaggtcgatcttcgcgacctgatcgtgaacaacttctctcgcccgcttcgactgctgattaacgaacccttgatcctagcggtcactgtctacctgagttttatctacggattgctctactgcttcttgaccgcctatactctggtcttccagggtgtttacgggatgaacgccggtgttggaggtctcccactcttcggcatggtggtgggcctgttcaccgccgcggcgtacatcataatctcgagcaaggcctacaataagaaactcgaaatgaacggtggtgtccccattcccgagtggcgtctcccgcctgtaatactcggcggtggtctcttcgctgctgggctcttctggtttgggtgggctggctttagtggtaacgtccactggatcgtacccaccttgagtggcctgtttactggatttggccttctggtcatcttcatccaattgttcaactatctgattgacacatatctcatgttgtacgtcatattccccattcctctaacttgccatgggtttatctaacatactatctacagtgccgcatcagccatcgcagcaaacacattctgccgctcaatggtggcagccagcttcccgctcttctcacgccaaatgttccatggcatgggtatccagtgggccgctacgcttctcggatgtgtcgcagccgtccttgttccgattcctattggattctacttcttcggaaagagactcaggatgaagagcaagttcgcaccattttatgaagctgtccaggagggacacgcagctgaggaggccgacgagcaggcggaggagacggtgcaccagcactgaacatataattgtcttgttttttgtacacgatcatattcccactagggaaatgtaattattaaaagtcatattttagcggctatgtttttgcatgtctcaacgaagcgatcttgattcaaacatcttcacaccattcttatacttgtactaatatgatgttgtatatcgggctcttctgtcggtctgatgatcatcagatcattgctgtggcaacagggataaattcaatctaaacattttacacctttttcatagccttttctggctgaagagaatatatcactttggtccccactggatattgggttgtatgatgaaaaataggatgagaatgaatgtatgaacgcaatctggatattcataggaactctcattgacctaacttagtccagaagcaagagtatgctaaccaggaaataatctggtgcttaataaaactgccatttacgacaacgtgcagagtcgaacggagatgaacacgtgactttatacgtagtatgtgtagtatatacaaacggagtagtagaataattatacaaagagggtgcactctatctcatcaattgagctggtgtaaaagaaaaaaaaaatgggttacttctctttgattgagcgtgtcatccttagtgcaggggccatgctaatcttctctgtatattttcatttgaccatatgccccgaannnnnnnnnnnnnnnnnnnnnnnnnnnnnnnnnnnnnnnnnnnnnnnnnnnnnnnnnnnnnnnnnnnnnnnnnnnnnnnnnnnnnnnnnnnnnnnnnnnnnnnnnnnnnnnnnnnnnnnnnnnnnnnnnnnnnnnnnnggtagcttctctttgattgagcgtgtcatccttagtgcaggggccatgctaatcttctctgtatattttcttttcaccgtatgccccgaagggcgaaaggacatccttatagttcaatataaccccacttttctgcgtagagataccgccttcttgattaggtgaatggtattgaagtggcagaaccagaccgcctaggaggtttgtgccactatatttgtgccttccagtcccccccaccgccttcgggttgggggtgcaccacaccgtaaacccaattcacaccgtaagcccaattttgaagccattcatattaattactatctttcaccctaagtatctacccaaaaagattcccctccctgttgcgaagctaccatactatgtgataatgtagaattctccctactaggcgacttgggtggcggtcagccgtacaatcttgtccactgtttatccaacttcttcctctcttgtaaagcttctttctctctcctggtcttaattgatcgattggcatcttttgtactgagtataccagagtctgcgatctcaggaatctctctcttagtgatttttcgtttccgaggggcctgtgtctcccttatacaactgacggtatcgcttattatcgtaagcccttcgctatatgtttataatagtagaacgcacattataggcctcgttagagcttcggtataaaggtatctataccgaatagcttcgaaagctctttttgattcttctctaggttttaggtactctttagaggggtactttctatactagaagaagagatatatagaggaagactgtagcctatataagatcaccgagaaggtaggatattcctatcgccttaaactccccgaatcgatcaaggtatacctaatattctatctaagcaaactctaaagagcagcaatcactaaaccattacttagacaataccccgacctactgttgcgtgccagattccttttaacaaaagaagtgcatttctaatcgaatatcaagtatggaaaaggaaaagaaaagaaacaaacgtgaaaataacaaatgggcttttatacccctttagggacaaagccctattctcgtttcccctagaaggaaggtacgactgcctgcgcaaacgaccaacagtataatcctaaacgggaaagtacgagtcctataagtgctaattgtaatataacccctaggtaagaatacatttagtccctaaatactagcttctcgttatccacatggttgtctaatatccgattatcttacgcggcctcaatctattcttataggcgtatcggcggcctaggcttcgctagataggtattatagaattccttaatcatctccggagcattcttaaagttacctactaggtactatacgggatctaggttatatcctaaccactatatacagtactgcagcttcctataatactttcttatatctaggatctttttaacttcctacttattagtctaccctacctatattagaggtagtagatctatatattatcttataagtagttctatacttactaccttttatagcttacttaatttaaatattaggtagatattaattaactatagtaggtctaatttatatatattcctaacctttttaataatcttataaggtctactagtagtataggagagtttttaacttagatagtcctatagctaatcctttatagtaataaaaactaggttactaatactaaagtcctctttataacgataacggttagcctattatacctatagttcctatgactttataatctatttatatatatcttcctagatctattataactttaagagtcgatctaccgcttcttatttattatatattagtcttatatagttctaattaaaagatattgctggtttataaccctatttaacaaagaaaggggacctctttattatatcctacggaagaattaatactataaaatctactattagtaggtattctaactagttatcctagttatatttaatatatagtcttaattactatactataaactaatttataatttcgctctagctatctatttataggtggtatatagtagatagtttctacttaatccctaggattttatagaactctatctaaaacttagagataaactatcccctttagtctaatataatagtttcggggattcctataatctatataatattatctataaatagatacactatctactttatattagtatctttataatagggaattaatatcggtctcttacttagttaattaataataataaatactatatcccagacgggaaagtacgagtcccgcaagtgccaatcgtgacacctactaccactactcaggattagtaaaactaacgagtaggaagtcgataagattcttatcgctaggatatactatcaaaaactacaataccgcgttcagtggctaggacacgacctagacttacaatagttttctgtaagtaacttcaagaatactcccaagaagatcaagccttccataaccaatacctacagaagcctagactaccgatacaattataagaatagaccaataatataaataaagatagattcttagacgaccacgttaacgatgataaacccacatttagggactaaatgcattcttagccgggagttatataacgatctaggaaggatcgtacttgccaaacggagcaggaacgactatgcccctataccttcccaagtagtttctcttttttcctttcttcttcgtacttagaatttggtctgaattgcactcttttctcctgaatcgaattggctcgtaacactggattttggtccttatatatgtgcataaggtcaaaaccatcagacagcgtcatatcggacgcttgccggaatgcagccttaagggtatcatccgataaagttgatgcgagccactcaccatattctttaacggctaagtctccgaacccgggaatcttcaatggacctatctccttcgagccgctttggttagcggctgcattggaagccgtcacatccaatccaggtaggtgagactagagagcaataatattgataggtagatacagcgaaccgtctctaggaatataactggtctttcggttggttttctctgtcgctactactcttagatataaagcttgtctcagattgcattggggacatctttatacatctctagaagaccgcctttctcggcgtaggtatccaatcgcttaagggtttgcgtacacaatggataatgcttttttaccactggatccacctagtagtaagggccgaggtagtatatagctaaatcacattttatcatatcatagacgtaacgccaaactacttgctgtctacttatatgttcttcggtatctagttatacgtctcgattatcgagtattctccttatcacagataattttcctcttctcccctttctacccagcggacagagaaatgtgatcttctatatagctaaaatatatctttataagtcttttgccacaggagaagcgactagaccacgtctagagttgtttctcgattggtatccagactatatcagttttattaaaacgtttagttagatcacgctgagaacgactattgaccgatacaataatcgccgtattatcgaccctgatcctcttattataagaaactttctcccgaagggctttctatagcttctcttccagcactaaacgtcagtatatgctcggggctaatactaggtcttcttcggtgtccttcaccacagccttattgttcagcgtgacccgcaattctatgaagtagtgaatacagcttagcgggtccttgtcatagatcttatctttctcctactcagattcctaaagaaatggtaaggtattcggtcgagatcggcatgcgagattgagctcatcgtcgagaaggatagataggaagggactacaagcggatcttgtagcataagggcttcggaagtatcccggagtaggagcatacaatgaaagcgtactggcccagctccgtaccggcatggcaagactcaatggatatctctttcgaatcaatgccgtcgagacaggtcaatatacatgtggacaagcgagagagaccgtagaccaatttctatttctatttcgatgttggaagtagaccgcccaccggaaggaaatgctgcaatgcacccacactcaccgaagtaatacgtccttcttcttaggagggaagccaccctccgatgatcaaaagtggaaaccgaatttggaagcagtgcgagcctcaatacgatttgcgattgctacggccgacttgaggccacttaacctagccaacgaatgcggttagaatacccccccacctactagccctaaaaccatgtgacaaacggtagacgcgcttcaactgccgaggataggatgttgaacacttgaagaagcgccttcaagccactctactaagtaatactaacccatagggtccaactatgagaagtcaatgccgaaggaaatactgtatgggctccaatgagacacggcgcatgcctaaacatgcatgtactggtagattagtgatagttgcctttcggcccagccgtcgggcattaatgaattgtgtgtgtgtgtgtgtgtgtgtacataatgggaacgttgtaacgcaccccagttcagaaatttgacaaaaccgttagagatgatgtccttaatgtatgtcttttgaccaccgcccttgcacccatcccacagaaagatacacgctcaggaggtacatcctggtaaacagctttaaatggcgtgattcaagttttttttttttttcaagcttattaggggtactcccatgattcaatggaagatgagacatacaagaaccgtttgatcctagcttgaagagtccttcaatgatatctcgtcgattgtcatttagacttgctttgctgtagaaaagcagtgcatcgcgataaagttcaggggagccttgcgcatatccttgagcgtcttccataatcatgtcgtaaacactagtttcgtgtaatacatatggtctatcgccattgtcgcgtagatctgtgtatataccgtctttggctcgtccatctatatggtatcgcgcgtagattgcatctccatagcgcttctcagaaatcgctatgcagtagcgagatgcccatggttcgaccattcgtattctcgccgttttattcatgacgtctgcgacgggaagatcgagaaacagctgttcaggtagggaagattccatgtttgcaatatcgtactttatagtcgctggtaggctttggaaaatagattcttgcgtcaaaatttcgctgtgtagcagacagtgcaagtatttgggggaataagtctaatgctacaggctcagccgagctatttgcgtggatgccgaaggattgtctgctaagtggggtcattacgtggatttacacgtgcgagagcactggagagatccataccagttggaataccttcaataactatcactactaatgcacggggaatcaaaagcggcgccaccttcatcctactcaccctggcgacacccaccgaactattggccgagcttgagccgtgagttagttgggtggatgaccaccagcaaatctccactgttgtatgtttttgtttttgttttatttagcttaagaatttaattcccacatagtatgtctatcattgcactgctaaaggacgttggccatgcgtcttgtatctatgagactttcgacatatgttgtagaatagactagagatgaataagctcatattttgacaatactgttggcttacagagctagttctgaatctaacagaacttgctcggactatttaccggtaacacgaagctttgagagccgtgctcggtgttttaacacatgtcaaacgacactcccctacataatgcaactgtgacatttaacgaagatcaggtaacaatatatctgacttattccaaccattatggcctgaacatatccgttgagaatgggcatcaaatacataaacataatgtgttttatgtaagaatagaatccattaattaacactgatctacgacccatagcccgggttctcagttttgtgagcatagagaagaagtcacgaagactatactttcgaattaagtaacacacgcagcaaaagacggccgtctcagtcccacataccatgtcgatttcgcgatataaggcctatcaattttgtatccttctctctcatctatgttgtcgactgtcacttcatgtggctctgtacacatgctcgcctttcttcttttaggttagaaccccttgagctctgcgcgcggcacatatatattaagttctgaccctctatcaggggttctcggctctttctacgatcatgtcaaggccgggacccagcccgcctgctgctctggtgtatgcacagatctcgataacgatgtcgccagctgtcatgcatgtaacataactgtgagtgaattcctattttaactagagtatataacattggaagtcgaccttctgacacaaatcttacttgatagtgcactagcgaagcaccaacctgctgctccgcaacctgcaccaacacagccattgacccggacacctgcggcctatgcggtagcaaatgcacaggcaccaaccccgcctgctgtaacgggatatgtacggatcttagcacagatcccgcccactgtggaccatgcttagcaagctcgtgtactggtgttaatccagcttgctgttcggggacatgtgtcgatcttaattccgacactaatcactgcagctcatgttcggctttgccgtgtggtggagcacagcctggctgttgctttgggcagtgtacagacctatttaccagtttgcagcattgtggatcttgcactgctgcgccatgtcctggcttgctaccggcttgctgtgatggagcgtgtactgatttaacgactgatgcgaaacattgcggatcgtgcagtacagctgtatgtgctccccccccttcattggatgggcatactaactggtgtttcctttgatagtgcaatctagggccgggaggtggaggctgcgttggaggtaattgtattagttgtcctacgaaccagcctttctgtcaatcgtcgaacacatgtgtaagtttccaactatgccattgtagaactctgaactaattccaaaaatcagtgcccgggtggcttcacgtgtatcaataatggtcctctgcctggatgctgtgggccattgaatgtctgtccgccattatcgaattatctcggtgattccatatgtgtgagtgatgcactagactccactgatagactttctgaccagggtaagatagtgtccgttgccatgtactcttatcatcgcgcaactggtttgtataggattctaaggtgaaccttgtggtcaattcgaggtggaaagagacggcgagaaaagcggatctgaataaatggcctgcaaaccacagactgtagcagattagtatagcttggcaaaagttggatgttcgagatgagtttattcatattgtacatgctatgtatgatgcgctgcaggtatattaacatttatgaatgcccgaaatgaatatgcaaaaaaagtctcgttacgttcttgaccggtcgttataaagaagagtctttcatccagggcacctcgacatcaagggcgtttgcgacccttgtcgcggaagcgagacatccctcaagcagtaccatcccgtcccagcaccaaccaccaacgagccagacatttccatctccattccgccaaaattggctcttgtcatccccaaacttcttctggctgaaaatctcattgatgatttgtctgctggtggacgatcgcaagacacgagtgaatgtggcagtgtaaaagaccttatcggggtcaatcggagaaatgggataagtcgtaataagagcggctgacggatgttcatggatcgtctccgtcgctgtagcatttgagcacatgtggagtgggtgaggtggtgattcgccgcgattcaaggaaacttgcgaccagagggatttgctagaatcaccaatcccggaaaagtcacggtgcacaacggattgaacggtcgtagtggggacggccttcattgcgcttcggagaggctggaaaatcgcgccaaccacatcaggcgtcacagccagaatgacatggtcaaatagccgtgagctgctctggccatcctgggtatttgtccagctcacttgaacttttgtgccgatgttctcgactgccgtaaccttcgcgccaagtttatacgtcaagtcttcggacagcttctgctcgacatgctggactccaccaagaacagtgtagtggttcttacggaacgttcgtctcccataaccgaccagatcaagagccgggaaatccattaactcgtcgtgtgagcaagtcgcaacgctcgcgaagaccggcaggaagtagtgcttcacgtagtaactgggcaacataatcctatccaaatattgacgcagagactcctccgtgccagacgactccagagtcttgggcgctacaaagaaacagcagactttgaaccaataatagcatattgccaggtagcaaatctcgagcagccacccggtccatgataagccctccgggcgcaggggaggtatttggtggttatttgaggaatgcatgaagtatggggaggtttgtttcgtggggttgttcggtagtgtcgacagggagtaaataaaccgtagcgagccgtatgggataccgaaataatcatacattcgcttgagactttcgtagtatccgtcggcgaatgtgcgcatgggaagatcgaggcgttgggtctttgcgcttccgccattttgggttgtgagattgtatgatgcggaatcgagcgaaagtttctcttgctgtgttttttgttgggattaactttagttcgcgcgagcgacgtcacggatgcgaaagtttgtaccttttcgaaaacttccacgtcgaatctcccttgaggatcgctcctgagcatgtatgcgaccactaacccggccattcccgtgccaactacggcaacatttttgtgtggttccttcgcctgcatggttcggaaggaaaggttggttcacagttccaagatatagagagcgtatacgtgcattcccgggattgagagagaagtcgaaggttaagggttcaagaattcgattgaaacaataattgaccatccacatgtggctttcaacatttcaacctttccctaggaggttagttaatcatgccccacattgtgtcagcaagggcctcggtataattccttgtgcattcatatccgtccaataatgcagaatatatatatcagcatatgataggccaatgccgagtacattgttcccctttcagttagtgcgaccttgaaaccactattgggttggttggttgggagtcacaaggacatgaatggcgccacgggtgataaattggcgccaagcctcggtgtttggtatgtgggaaaaggagtggctatgaaacaacttatgctgtactacagctatgttgtgtaatctcgtcgtgaagtttgtacaacgtatgttgtaggaatcaaattcttacttctatgtcgtgtgggcacctgcaggttccatacctggatgacataatcagatggctcccaatctttatcgcttatcgtcacgtgcgtgtttgttgacgcgtgattttggattttggactcgagaacttggataggcagggaaacagatcaagatatggattgagaggcatgcacctgccgttgatataaggtgttctggaacatccccaggaattgtgccactatcttgtcaactactgccatggcgcgccctaaaacagttcnnnnnnnnnnnnnnnnnnnnnnnnnnnnnnnnnnnnnnnnnnnnnnnnnnnnnnnnnnnnnnnnnnnnnnnnnnnnnnnnnnnnnnnnnnnnnnnnnnnnnnnnnnnnnnnnnnnnnnnnnnnnnnnnnnnnnnnnnnnnnnnnnnnnnnnnnnnnnnnnnnnnnnnnnnnnnnnnnnnnnnnnnnnnnnnnnnnnnnnnnnnnnnnnnnnnnnnnnnnnnnnnnnnnnnnnnnnnnnnnnnnnnnncggcgccccgacaacagccagtcttccaaataacctccgcattccctcatcgaccccgtccctcacaaaatccctgggaaagctatccagacaagcactactagatctggcatttatatggcttgacgatcgcaacatcgcctcatttccaccatacctacagactgacgaaaaagatggccccgacgatgacgaagccctcccctaccccgcggaggagacaatcgaacaagtccgccaagtatatgaagatcttcaggaccgaaagggcgcaaagcgcgaagtgctcgaacgaattctggaaggcgattggcggcatggaatcacactacgccagctggccatggcagacctccgctatatggacgatcaccccgccagccttcgatggaccgcactcgagctcagtcgcattgatacaaagcgcaaggtctccaagaaactaccgccaactgactggtccagttctgtaccgcgcatgcaaggggcaacatttgtgcaaggcctccagcgagaaatctccccattggtcaaggctcactatcacctcgcccactcggcaacattgccgctgacattcttacgtatctttgtccttgactcgccatatcaatctcctaggcaggcagccgacgtctttactgattcgtcccgagtcatctatgtcgctttcccggatagttgcccctacgtctacacttctatagcagcatccaccggatcaaagtctgctccttcgacaagctcggtggctactgatactcgaactctccagcgcctggtgcgtgattccattcccaaagctctatctcgtccgcaggaacgattctctctgcaagcgacatcactggcagcaaagaatctgcccacactcttagcccttcgcggaccgggacgatcaacggcgtcaaatggcgcctttagcatatttgcagacgcagctattgaaggaagtcctttggaccctcgaccctccaatacagtctcacctgaagagcatatccgagcgggtcattctagtctagcagaaggcaaagaaaataccgatggcttatcgaccaaacgaagatccagcggtgttgatacaggtcccctctctccggattcgaagaaacgtcgtctggccatcgattcccgattcggaacattggggtcatcactcgcccaggcaccgctggaccgtcttgatatccggctgcttgacaaaccaggctccagtgaacagcaggatgatgatattgacgactctacgtccacgcccgccgtgtcactcactttctccggctccgacgtcatcgccgggattcgcaaacttgctgagctaggcatcgttaaccctgagcgtatgccgtcgtggatgactggagaggaaggtgttagtgttgcgactgttcgactaggccaacgacttcaaaagggtatataaatgatttttttttggtgtttggattttggggagttgagaagcttggtccttctttgtttcttcggccattagggcttgatgtgatacccggacttcatatgaatgatcattttgttgcttttttatcacgtagaagacgtcctaaccgagtatagtagcgagtgaatgtagtctacacttcacatgcaaaattgtaaacatggcattcaattcatgtatccagcattaaaaagtccacctccttccagaaccttggggcacatttgcaaattcacaagataagtattcctccgatcgtataattataattgctcgccatcagagatcattggatatccgacatagctaatgtgactagtctgccattgtcctcaacgtggatatcgcaatcctttaatatgatatagtaattatctatatccacttcgacatcaccaattaggtattgctgatcgagagtcgatactggcgtcacaaccaagaccgatatacttcccggcgtcgtatttgcggtcctttgacgcatcagcgcgtatggccataagggcatcagtcgcagcattgcccttggcatcatgcgtatcgacaatagaccatgagctgctcagtaaatcccgtgacgtcatcttcctcccgattgttagccatatactccgtatattgtactcggccattatagccatggatccagcctcctcatcagtgacagccgagctttctccgacactggcagatcctggtgcctaaatagttaacctatgcaccaaatagtaatacgtagaaagtctcgaggtcgtgggtggacacacctatttgggaaagagcggctgtttgcactgtttgtttggggaagcttccctatcgctatcagctcgtggagaagaagtggactgtcttcatcaacaagatgaggctatactgcaacgcctgccattgcagttaattctttacccctttacttcttcgccctagagctgatatctgaacttattctctatgtcacgtccacgggctctgtcgggcgctgatgccccaaaggagccacatggggtctccctcaaaggtatgtaaatacaactcgaccgatagttggaccagcaagctaattatgaattgatcagtgttacggtacgttaaatcatccatattcgttgtgtcgatgccagcctctaactcttaatacgcagccttgcgcggccgtcgctttcctatcagcatcccctcccgacgtctaactctataatctccacgaaagcctcactaagctatccgtccggtgactccgatgatcaatttattttagcgcctcttgtgagacggtgaccaagcgccccaaggaaaccgtttactaacggcaatagcttactctacctccctccttcggatccgtctacgtcggagagacgttcggatgcacacttagcgcgaataatgagattcacgatgacgacaacgagagactcctcacatccgtgcgcatagtagcggaaatgcaaacaccttcgtcagtggcggcactggagctggagccgcccaacgactccgcatcaacagacggtctgaagataggcgagtcattacaaaagattgtacggtttgacttgaaggaagaaggaaatcacatactggctgtcagtgtcagctacacagagacgaagatgggctccgactcgcaagcagctagtggccgggtcaggaccttccgaaagttataccagtttgtggcacagccctgtttgagcgttcggaccaaggcgtccgaacttccgccgctcgagataaataataaatcactcggtccgtacgggaaaacgaggttgctccggtttgccctggaggcacaattggaaaacgtgggcgagggcgcggtgatagtcaaggtatgaattccccattaatcctctgcgaatgactgggttttccacgccgaaacgcggctgtacctgaaaatccggctgggccggaatgcaatgctcaacaatttggctaacgttgggggatggacagcaaacgaaactaaatcccaagccacctttccaatcaaaatcgttgaattggaacacaatgagcccagacatgtcaccctcgtctctgcctacactcaatccacgggatgttctacaggtagcatttttggtggaacaggaagagggccagaccgagggacttgaaatcctccagaaggacatgcgacgggacggtcgtgccacgctgggtcagttgtcgattgaatggcgcggcgctatgggggacaaggggttcctgacgacgggaaacctgatgagccggaaacgcacttgaaacgcggtgtgcaaccaacccatcggattatttccgccactccgccctgcatcatgatatggacgccgattgcattatgtagtgcatccagccgctggattgcatgagggcgcagcaagggcggtttgttcatatttccaatggcccacttatataatattacctttgcattggaagcagttgaaatgtcctgaattgggtgtacagtgtaatatgtcggccgtttaatataccatacaatctatgtaggcctcaccgagcaatgcctgaggctctgggatagagccgatgcgttgccgagctctctggcgccactagcacggagcggaaaccagccttgccatgcagccgacgcttaatctttgtcacacagcagccgcctttcggcaagggagctccggtgctagacactcgtctaatttggccgcccatttgctactccttgtagggcttcacaaaaaaaaaaacgggcattcgtcctcggcccaaggccacgtattctacgggatgccacatatagaaacagtacttcgggtatgtatacatacacatgtaaggtcttttagagtccagatttatcgatatggagtaggggaatggaagcatctagactctggctgatcaatggggttcagttgtttacataggcctatgttgttgcccgatctcaaagatcattatctgcaatctactccgtatgtctcgcacagacttccacgggttctattttggttttactcacgggcttttacctataaatgattttcgtcatttttttaggttgtcaatactaccttgatctgctccaccgcctcttccaacattgagtcgtattgctggctgcattaagtgcatacaaggcttgatgtacgctgacaggagtcggagtgaataaccttgcccgaaacactgggatgcaaccagttgaaaagggctatcggctgggggagcccatgtgtcacgtaacgcgggtatgggccgtgttcagggacttacaacataaatagatatgtatttcggtacactatactccgtatggattaggtctattggacttgactatggacttagtgtttgcttatattgtacttgtccacagatggtacttggatatctaattatgagagatatacatagtaatagagatgcttggcagacccaggggaatactgacaccggaacgaactgcgattaacccacatactatccatatttttatcaattggatactgtggaaactgatatacatacaacatcttccgcacttaagcgatactttctttcacccctcgatgctccacagtgtccaactgtagtattgatcatctccccgggacaagccactccacttgatgactcctgactcgaaatcctatgtcccaaagtacacatcgtgtcatgcatagaaagtacggaataagagaaacggtgggaaacgtactccgtacatgatactagttgtaggtgtggcaaaaaaataaaaataaagaagccgttgggtggactccgcaatctaaaagcacgagggaataaacggtaaagtgaaaacctacaatctcccaagaccgcggcagttcccgatggttttcaccccctgaaagtgctagttagcagtttataaaagttagatatacaaaagaatgacattgtggcgctataccaagcaaaaaacccctaaaacccctaaaaagaaagacatgttgacgccatgtttcaatagagaataaaccccagttaccccccatagatagcgtactagttagttgacgaacctggttaaaaaaaggatcagccaagacccgcttgcgttatccgctaaagctcaaccatggatcacgggcctctaacccctggggcggatgcaatatttccaaggttcgtggttctttatatcttgtaattggaagttgcctggtatctatacacaacggtaggtatcattcgggaaagaagtggaggagtaccgagggcatacatcgctgttgatatagacataagaatgaaccggtattctgggtataccccggaagtctggatcccctttagagtctagccaccctgcacatgcctgcaggtcgttacggtgtcaagactcttgtgcatggaggctagggctgtgaatggcccgggcccttgatgggcttgatttgttaaatatctggacttgacacgggtgactcttaccatttttatacagtggagtagagatgtgcatttcgaaagtcgggttctagtaacattactacacgcctacgcaaccacccgtgatcctagggggaagaagaaaagaaagtttttttttttaaaaaaaaacaacaacaacacaggaatattccaaaaggtagaaaatatatgtatttaggtagaaataatacctggaggccacaaataaaaaaaaagctaatcagaatcgaactcctttttaatacaacgttggaccttcaaaccaccccgaaattgatcttcgctctgaactgcccctccctcccgttctcccccatttttaccagcttccccctcccgaacactacatgcgctcaattcccctgcgcattcctttccctggaaatactacgatccatgtggtgacaattaaggtattaacccgctacagtccgtcgcgactctctccacaatgccaccgcctccaagcaccccggaaggcgcccccctcgccgactacttctggatagccggtgtcgatggtgcagagatcctggacacttttcagagattgggagaagattaccgtgccaatggcaccgcatcaccaggccctgcgctcgcagacaccattcaggaggacgccgatgcggaggaggaacacaacccggatgggtttacccgaccaaactcgacgctcttcaccggtgtcagtcacaggggctcttctcaacgactatcaacactttcgaagaactcagagggagcaaatggggctggcagtaacagtaaccgaagcagcatgaccgtcaagggtggctcgtcgcccctgcgtgccccaaatctgttctctgaggacttcgatttcgactccgcgctgtacaagttcgccaacgagcgggaatcttttctaaccgacttgagcttgagcgctggcgctattaccccgaatacccgcccgcgatccagggttcgcacgcagaagatcgtctccgaggattcgccctcggctggcggtaacttgctgaggtcgggtattgggagcgtgcgacgatcctttcgtgatatgaatagtatgaagcggcagccgtcgattgctcgtcagggtgagagccctccttcaaccctatttcctgttcactctaaaacggggtcgtggccgggactttctgtggatacactagctaacaatggatcgtcttcagcttcggtgcgaacttctcggcgacttagcaactacaactcggtaattcctgtcccgcaacccctcgagatatcccccacaatgcacccgttgaaacgacgattcgagcccgttctcctcgaccgataccctacacgcggcatgccggacgagatgaagctgcgcggcaatttccccgactacgttcctatgttcgcctttccgaatgatgtcaatatcgtctcctccgatcagcgaccgcgctctacctggcacggattcgccatgacaacagacaatggctccaggctgcacgccatctgtgtgcttgtctggatacccctcaacccaaatgctgcagaggagctcgagaagcgctgcgaagaatggcgaagggacaacatgacagacgaagagcgtgagctggctgcgagcttaggtgaacggttggcatcagagcgggccaaattatcccggctcctagctcagctgccgactgtccagtcagggtcagaatcccgcgaacagctcgaagatgatatcagcgctgtggaggagaaaattgggctaatgaccgatcttcttcgtccggtccggcacggcgcagcttctaagatcgagggtctgaccgatggtgatactgggttctggattccccgtgcgtacggtatcttgggccgagagagcacgatgacgagcttctggaaggaatggctcaaggccgtcgtggtgccaatgacggaaagcagtgtacagcacgtgcctccaccctcgccgcgcatgggtgtatggcagccattagagcgatatgtgatgaatctctgcacagaagcgttctgtccaatatcttcgaagactcaggtcgagattgcgattcgtgagctgcggttgtttgcacgcaaagaggcacccaatgagatcccaggttcccggaatgtatgtgcaccacaatcttgatggagttctctgtgggaatttcgctaactgatttctagaccgatctctatgccttgttccgaactttgtcggttccaaatattatcattctctttgaggtaggcttgatttgccagttcagttgacaagacactgctaacaactcacagtacgctcttactgaatcccgtatcatattcttgtcttcccacacctccatgctctatctcgcgaccagagcgttggtcgatcttttgttccctctggaatggacaggcgttctcattcccgtccttcccgcacgcttaatccaggctctcgaggccccttgcccatacatcgtgggtatcgagcgtcggtatgagaaggtggagctgccgacggacgactttgtcctggttgatttggacaacaatatgatcgaaagcaccatccaaccgacttctcttcctcgtcatcagcgcaggaagctcctctctttgttgcaactagctgcccctcagcacggtcgatgccacgtccctaccgggcctcctgcatatgcaatcgagacatacccatgggactcgttcatgtcagagagcaaggccactttcacatccaaagcgcccgcaactaacctcgcgaaatatgtcggtctgaactccagtgcattcggtgcatcggccgtgacgccaggctcttatacacctcccatctttaacgtcttcctccacgcccgagccgagggtggcccctctcgtgggtactcatctcgcggtactgagcgcccagggaccagctccactctgagagtaagtgcctctccgccgtccccgagagagaattcacccacctctggcttcttccctcctccaacttcctcgtcgcgcaatgattccggtatggcgttgcaagcttcattgcgcgagaagcgttctggccatttcgatgccgcctcacgccgaagctcgtcgtttggaatgggtcgacgtccaagtgctccgttcctcggtcatgcttcgaatctctcattgagcactctcaatactgactacggagccggatccacatatgcgccatctgtgtatgcgcagtctaccatcgctgcgtccacgattgtccctcaatccacataccaacccgttggcaataacgagggcacttgctgggctgaaggtcactatttccaagtccaaccctgggatgacaagttgacatgtgctatctgtgatgaactggccgaggaaaatatgtacaagtgctctgcatgcagactgacagtccacaaccgctgcgcgtccatggtgtgtctgccgtgtgatgctgccttccatccggatcagattcgcgcggcgtttgtcagatgctttgccagcttgttctacacgtataagaagttcctggtgcctgccagtggcgataagaagaagtccggtatgttttacaattttaacatggacgctttcatgaagagccttccaagtgagcacgccgagtatatcgcaattctacagcagacacaaggtaagtccacgaattctgctatcgtaccatggaggtaatattgacccagtactaggattcaacgagttcattagtgaccgtgagcgaacaaacccgaaaaccaaggatccgcgcatgaccctgttcgacgaaattgttctttcgaagcgtaaccgcggccgcacatccatcttctccggccgttccacaacagacttcctctctgacacctcgaaccatatatggcgtacagccaacgctaccttcttccccccaagcagccgcagccagcagaatatttcatccgactacggtagaggagttcgcacaagaggtacgcaacgctccaacacccaatctgattctcccactgacaatctccctgcagcaccggcaaatctagatcctagcctgatgacagaaccccgcatgatccacggtgcgccacgggtttccaagacggcaaatactgctcgtagaaagccgttgcctaaactgatgaacgggctcgccgtctctccgcccagttaattggtgtgatttccacacgcgagtgacccgtccatcatctcgtcgatatctgccctgcccttgtgcgggtgggtcctttgtgcgcgggcaaagtgcaatgtccgcctttttgaaacacttccctctgtttccttgcgcaaccctgaaacctgaaactcctcccgattccggctcggacttcgatttccggatggtggcgctgcgcagtccatgctttatctcacgacaagcaaataggatggcagttcctgctgcgtgtcttcgtttgggcagtgtgccatccaagctgagaatgacaggccgctggctcggctctactccttgcttaccgatattaccccgcaaatggaactgcatgtggttgcacgcctttagcctctctcccgcttgaacttgcttcccttatctgacctaccatgccttatcgtggtagaaccgacgtctggaaagatgtcaaacaaaccacgtgccgatcctcagttgcgttgctgtcttcgtacatagtgttgactccggcttgatgcacggagccatgaccaaatcccctaaaagcgccatcccggattgcaaagcgatgtggtgattatttgtgtgcctgatattgattgatacatacacgtttattctctgaaccaatacctcactctgcttctcttgcccttccccctcttatctctcggcctgcgtttctatcttttccttcctgttactacccaataccccctcttgatttggctggtattttctctccttctgtcttaattggttgtcttaagtacaagctgggtggatctagtctcgatttctgttttttccatatttctcgtcatttcggtgtcaatcatacctatgctacgtggttcacgactatccttcgggtatattttcctttcagatctgatttgacactgtgacttaattttggttgctttccttgcatcaaggacagaaagaagaaggaacaatacatagatggttgttgtaccgtgcatgttgcgaatataaaactatctcatctttgggtttgcgctttgtacaagtatccatgcactcttccaccaatcccgatgtctgattcattgtttatctgtctgcctcggatataataggctatgtaaaggctgagcactcgctctcccgagtctgaggccttggatcggtggttttccctcgtatcggatcatggcggtgtagtacagccctgtcagggcatcgtgaggctgtgccggtgccttaagatgtttcataaacgctgatgggaccatacaagttgtagatgcggtaattagcaggatttcttcggcatacaactgctggaacatctcctttccactgcacagaatcccaattaatacatccagatgtagtataattaggcgtcgcgcaagatgattggtggagaaacccaaactccgctcccactttcccccgcattcgcattcgcattcgcattcagccgtcgacctacgtaggattctcttgtcgcgcattgggtggaacctccgcgacgagttcttccatcgatggcgcctcaaatgccgtcctttctgatcgtcgcggctgcgttattggattgacttagcgtccctttagtcgacttgtccccaagttaccccatatattcgagctagcctcgatcggcccgctccctttttcctaattgcgttggaaaaatatcccatgctttaatatactacctgcctattacattacccgggtcctggccgtcgagaagcgaattgcttggtccttgcgctcattcaaccctccccgactcttatttctacccgtcttaacccatgcttcgacctgcacaaatatcctcgccagcaccaagtatgaaacccattgagactgccgtgccatgattccgacagcctttccgcagcacatggccacgccgctgctcgacgatccccctatctctgccgccctaaaagcccaggctcctcctagcgcaaaccccaatatcgccgtcccttttaatgctgcgacaatcgtccctcccgctactatggccaccgagcccgaagaccagacagtcgcgagcattgctgcgccggccgccgctactgccgtgaggactgtcgtgatcatctacggccagaatcaagagcatattgtacaactggttgcggaaattctgggcaagccatggacaacagatgagtcgcttgggatgcttgcgcgagccagcaatgcattggtagtgggaatcttagcgcacgatctagcgcgaagcttacaaggatgcgagcgatcatctctggtcctggtaaacacgtactgcgtggaagacgggtctgcgccggaagacgcgctcaccgagagctgtgactatgagttcttatattcgcggagtccgttcctgcgccgggacctggcgcgatttttgtctttgatccttggccagacgaggccgcatgatgatttgcggaccaagactaggacgaattttatctcgactacttttccggatgtgcatgctgctttgccgaatttggatatcctgtctgtggggtcggatgctgttgagatccgtgtggatttgctggttgaacctgtgccggagggctcgaccgctccgctagttccaagtttgaagtatgttggtcagcagttgatgcttttgcggcagcataccgagttaccgattatctttactgttcgttgtacgagggagaatggaaagttcccggtagatgaccctgcgctctgttacagatacctgcggcgcgcgatacaatggggagttgagtatatcgatgtggaagtgtggctaccggaggatatacggcgccagctgttcgaagcaaagggccatagtatgattttatctgcgttccatgacatgtccgggacctggaaatggacatccgaagaggcacagcgcatatttacggaaagcgccaaatacgccgacatcgtgaagatgatcgccatggtccacacaatcgaggagaactatgaactagaatacttccgctccaccatcaaaagccgaggctcagggccacctctgtcagcagtcaacatgggccaaatgggtcagctatctcgagctctcaacaccgtcttctctccaatcacccaccccctcctcccaatgatcgccgccccgggccaactaacggcagcggagatcaacgaggccttacacatcatgggccaactccccaaacgcgagctctacgccatcggctcattccgctcaacgccacattcaatgttcatggagaaatgtataaacgagctcggcctcccgcacaacttcacctcagtcgacctaggcccaaagggctccatggaatccgtcctcctacaaccgcacttcggcggcgcctacgtcaacccccccgtcccaaccacaactagtttcatccctgcagtcagcgacgcagcccgcgcaattggattagtcgacacaatcgctatgacacccgacgagactgctgtaggaacgtgccgattaattggcgaaaacgccgcctggaaaggcatccgcgctaccctgacgcgcgaatacgtgccgtccgcttacagcggccgggcggcgataatcctcgccagctcacaagcagacgcttcagcggcgattttcgcgctacgcagtctggccgttggcgcaatctacacagtcgggtttaaagcgagtggcccgctcgcggcgggtctggagccgttcacgtccatccagtccgtgaaacgggtcgagcagccctttgttattgtctctgcgctgccgccggagaaatcgctgctcgtgcagcctttgctgagacattatggtgttaatggtcgttcgtcgccgccttctactcgtgggaaggtttatcttgatcttacgagtgggacaagaaagggggatcctttggctgttgctactagtgctggatggacggcgtatggagttgaagatgttagtgcttggactaccgttgagacgcttaggttgcttgttgggcaaaatgtgccgtttgacttcgtgcgcatggcgtctgggagacctctgttctagtcatatatattataccgcatacctacgtaggtgatttgtagttctgtttcattgtttgttgatgccatgactgctaacgaccagacatatatatagatgctgaaagataagaacttatcagaaaatccggggtcgacccctcaacccctcatttcctccttccaaggttaccccaagctttggttctctctacctctatgcatatttccttctagattcatcgaaacaaacagaaaatgcatctgcgtcctgatcatgcagtccgagacctcccaaccctccacgcctttatcgaacaacacccacttggcgtcctcaccacttcgctcccttcagagaatcatcccacactccaatgcagccacatcccctgggtgttggacagtgaagcagccctcgaacccgagttaccgaaggaaacaaccctcgaatctgagttagcaaaggaagcaagagtacccgatggcagcacttccgcaccgccatatccctccctgggagttctccgcggccacatcgcgcgccaaaacccgcaaagcaaagcgatggtaaaatctgccttggaatatagcaccaaaacaaccagtatccccggcgcatttcctataaccaattatgcagaagaaccaccgacatcaactagctacactctccctgatgaggtcttagtcgtctttaccagcccagtagaccactacatcacgccgaacttctacacagagtccaaacccgccacgggcagggtcgctccgacgtggaattacgccgcggtgcaagtctacgggcgggcgactatttatcacgatgcagaagacgaacaaacagagctgttcctacgacaacagctgggtgatttagcccggcttggagaggaaggggtaatggggtttcaggatgagtctgggtttggttcgggttcgggttcgggacctgatgtcaaacacggaggtggtgaaaccgaaactgggaatggggatgaggagggggacccaccccaggaccagaaccaaaaccaaaaccagggacagcgccaaaacctgatccctgatatgcagctgaatcaggggtcgaagacggccaccggggctggcgggcatggcgacatcatgccattgccgaggtcgacgtcagcaccttggaaaatcgccgatgcgccactggactacattgctgcgcttttgaagaatattgtcggcatgaggattgaaatcacccggattgagggtcggtttaaggttagccaggaacggccgcttaatgatcgtgggggtgttgttcatgggttagagagcatgggtgggagagcaaaggatatggcggactttgtgaggagagggaaggtcttgcctgggcaatgatggcattaagctttttgtgtgtatagatcctaggcccttcgagcacgaagtatccgcagtacgtagactaatagtgccaagctcgcgaccacgtacggagtgcagcccctactccgtagtgttggcggcccgggcttggcatgattactcaacataaaatggtctgtgtagaagcgcaaactcctcggaaagttaaaaaaagaccaggatggagattccgtctcgaatacagtagctgcagtggatgatcagggatcggacgcgtcttaatcagaaggtgtaataagcgggggccaatagtagtcctgtaacagccaccttcatagaccgtaccttttgcacatacctcgaatagttctgcaggaaacacgggtaaaatgaagggtcttaggggtctagatggcaactgagaacccccgtggtgggatggtggacagacgatagctattgactggctagatacaatcaagctactgcaattacgtgcaattatggggtatctggatcatctcggatgctggcggcgaagccctaaagcgggtggcattccataaaggggaaccatcccccgtctatacagattaaaggggactgaaaccagttctgggttgaatgggatgttagaagtagagtgagtcgagaataagaacgaacataacagctacatatcttcattgtacatatatatcatcttctagcctaaactatggaataaatacaaaaatctcctctccccccccatgtcagcccgaactggggaattccggcggcacatcacttctccgcatttcttcctctccgcaacctgatcatggtataggatttcccttttttcctaaacgccacagccatgcgcctgacctcttgtccatcttggccgcggccgtcttctttcttcttttcttatctctcttccatgtagaagtgccatgtctcgtcctcaggtcagcatcgaccgtctcacgccccgccgtgcgacggttgagccgcgcgaaaccatgaattgcaaatcctgtcgcaagcgcaaggtacgtctactcagtgctagtgcgattggctctgtctaacttgttatagatcaaatgtaatcgtatgcgaccgagctgcgaggcatgtaaggtcttccagtgcccatgtctttatggtgagtcaatcatgtcccctctatatcaaacgactcctctgttaaccttgttatgttcaagatgccgttcccaaaaaacggggccccaaaacagatgtgctagaagctcttctcaagcgggtcgatgggttggagaaacgcctccacgacgaaaagaaccccatctcgcccacttctcccgataccgcagatgatcagccgagctttcctgcccgtcgcaacaccgtcgacgcttcttttaatatttactcttcgagcgatcgatcggctctgccaacttctctcccccaacatgtggatcccttcattaggccaaccggccacccagcaggtcttctgcaacagccctctccgacaaacaatggtccactatcggatgcgaccctggatctttacttcgagcgactgcacggcaagccattttatatattagacgaggcaacaacgcggcagctccatcaactgaaccaattacctccgtgtttggccatggccatctcagcaatgacagtaaggtaaaaccaccaagcttccaagcgctgtcacatagcttacatgtttgactgacgaatcttagatatacaacctcgcctggtcaagtggaacagtcactacgttccgggctcgatgcggcgctacaagcaagacgtatgattgaagtcgacgatcctacagtagaaggactacagactctattgttactttcgcaagctttccacgcctatggtcttggaaagaaagcttatatgacattttgtatgcttggcctcgatcctccatggtggaatgaatttgactaatgatgctagcaaattgtgttgccatgatcgtcgcgctggatttgtatcgggaggctccctccaagcccaatatttcgcctgccgagcgagaaatgaggcgtcggctattctggtctgtttacttgatggacagattcattagctgtggatcgcgacgtccatgtctaatcaccgatcattcggttgttctgcgcctaccgtcttgggcaccacatgcagccggtctgaacatggagggagagctcttccatgtcggtccgaacattcaatattcttctgattcccggcgcaaatcaccaagtgctgcctctttgctgattgatatcacgcgtattcttggtgtcacgaataagtatctggcagctggcggagtgaaaggcgactctcacttcccatggcatgcgctttctaatctatctaagatccgacaagaattagatatatgggccgctggtacgcaggacgtctttgcgtctatcgactcattgttcggccaccctgagagtacaacacttttgctgagcaagttgatctaccatttggtgcactgtttgatctatcgcccgttcttacccattgacctggtagagctccggggtacagggcagcatcagtcctggcaaattgaggccacgaacttgtgtttttcgcactccaatgccatcgcagagctcgttgaactgggtcgcaactccccgctaatcgagtggcctgctttcgtcgcatactgtgtgttcacagcagggaccgtgcatgttcacggtgtgcactacaagggccgcgaaggagaggttttctcttctagcgctgaattcctgactcgggagatgcaccagcttgcttggctgcgtaatatttggactggcgtccagcatcagcgtgagctgctccagactatctatacgtgtcactccgaattagtacgcaatcttgccagtagcccaatgcggttttcgccagtcttccacctcgaacacttcctcgaccgatatcctggtctggcgttagatggatcacatgttcggcttatagatgcaggggatgatctagctccaaggtaggtcctgctggttcgttttttgcatacatattatatgatcctaactccgaagacagtgctgcgagcttcattgatcaccaggatcactactaccaacgaccaatcgccacaccctcatatcacaatccttcaccctacttctcaaatacccggcctgggccctcgagtccgttaccatccagccaggcctcagatatcgaccgtcgcaactcccattcccattctctatctcagaagccatcccacccaacttctctctcgcccagtattcaattccacacgatccaaggcaatcaacagcaacaatcatcatctgtcttctccctcccagccggaacagacctatccggtcccggcacatcagagaacacccacctctcgatcccgggattctccccctcgtcctttggactctccccaccagcctacctcaccgacgcttccatgcacatagcaccaacacccccaaacccgcaatacgcaaccttcccattcgacaccactcacgcaaatccgaacggaatgacgcaagcaggtcccaccgccctgaccccaggcggccagtcccacactagtggcactcacaccacagccggcagcgaaaacacatctgaaaaagacccttttctgcgcttgctagaacagctggctgagaatgagaactcgcagggcgggcctagtgagcttgagttctttctgacaggtaccggtgccgaaggtgatacagctattcctcttgagaaagatagtgcttcgtagtaggcggaaattggtttgggaatgataattccctcatatatattctcattctgtgtatatccttcgttgcatagcttgtttgcatgtaggctatggccgagttgactgatacccattgtgtttattgtttctagctacctagttactatgtgagatctgagtcaatctatcatataaccttggaatgctcctattagagctagacagaatctcattactaattttcattgttcacccggcatctgtgctcttcgcccggagttaccccggtctcggcggagctcccccccggaacnnnnnnnnnnnnnnnnnnnnnnnnnnnnnnnnnnnnnnnnnnnnnnnnnnnnnnnnnnnnnnnnnnnnnnnnnnnnnnnnnnnnnnnnnnnnnnnnnnnnnnnnnnnnnnnnnnnnnnnggagctccgccgaggaaccccgcgttgtaaccgatttgtcactcctctcctctcccataagatccttgaccatccccttcttaatgtcacccatccagcgtctcaaaccaatccaacgccttaaatctataacaagtcacctccaacaaacctccaaaatgaaactcctctacccaacctccctctacattgacgcgaagtccctagaaggcttctccgtcgaattgcatccctacgacgtcacagtcccaattcccgaatccctaatcgacgccgagttcctagtaacatgggccaacaaagccacgaacctccgcgacgcagcctcccgcatgaagaacctccgctggatccagtcgctagcagccggaccaaacgacgtcctcggtgcgggcttcgacgcctcccgaatcgctatcacaaccggctccggcctgcatgacgagacagtcgccgaacacaccctcggcctgctacttaatgctgtccgccgcttctatgaaatgcgcgactaccagaaccgcggcgagtggcccgcccacctgggcggcccccagcccgatcgcgcccccggcacgttccgcaccctcaagggtgctaatattaccatctggggattcggaaatatcgccaagtctctctcgcccgtgctgaccgcgctcggggctaatgtcaccggtgttgcgcggagtactggtgtgcggaatgggttcgaggttgttgcggaggatcgcttgcaggagattctccccaagactgatgcgcttgttatgattctgcctggatcggcgagtaccaatggtgcgcttaatgctgagcgcttggctttgctgccgagtcatgcttgggttgttaatgttggccggggaacttccgttgatgaggatgcgctgcttgcggcgcttgaaaagggcagcattggcggcgcggcgctggatgttttctccgttgagccgctcccgaaggagtctaagctttatgccgcgcctaatcttattctttcgcctcatgctgccggtggacgtccgcgtggggctgaggcgcttattgcgtttaacctgagacggcagcttgctgggcaggagctgaagaatattatttgagcttgatgtggagatggctgtggaggtttcttgatagattttatgagtacatttacgaagagggttagacgccatgctttgcgttggtcttgttttgattacaaggaactctagaaagacaattacagccgaattacacaatcatttgagaactcagaacataagtgtgatcaaaattaatttgatataaacaaagagggaagactatatacaatttactatatacaacaaagcacaccaaaagaccctatttttcaaaacaccgtatcgtaaatgccatcactgtgtcacctctcagatgcggggtttactgggggcacagcatgaagaagggaacgcattcttcgactgggtatcaacacaaatagcagaaggaggcacccagagggcagggttcttctcgaagaagtttgacgcacgcagcataatgctaaccggctcagcaggcatgatggggaaatcctcagttcgcgggaaatgcgtcagaccgaactgcaggtagcagacgatatcggtgttctcgatgttctcgtcgcgcttcgcccagtcggcgatggtcgagttgaaggggtgtccctcggagccgtcagactggcagacgtagtcaccagcggggaagagctcgtagtccttgtaaggagtaacccagaggggcttgcgggcgaaggcggcacgcttccagacggtgctgccgggcttggcgagcataggggggcagttgttgttgaggatcttgtaagcaacgggctttttcgcaatggcatgaatgcggttcgggttaatgatgtcccatgatcggttggtctcgtagcagtagtctgcggcaccctcgagggatgtgcggaggggagtcttcttgctgtagaatccgttaccgtaggggttctctggggagccgacggcggcttcggcggagacggcgtcgttctggacgacggagttgttttggccgtcaatttcggggtcgatgcggagggagaacaagtgctggtggttgtgggcgttgatggagggggcaacttctgtgccgaagggagcggcggtttcggtcgggtgcatgcagtaggtgttcagcataccggtgagcttaatctccagcttgtaggtaccatccagggtgaagatgtggtagaagccgtattcgtagttggcagcggtgatgatttgggacacgatgagcttgcggtcacgagcggagatcactgtgccatcacggtagtcggtgtgcttgtagaggaggccgttgtcttcctcgtgaatgcagatagcgttcttgacaacggcggcctcacccttggaagtggacatgataccatccatgtagtggatgacacccttgcaatcacaacccagctttagggagttggtcatcaggccagtgccgtactcgccgacatcgaatgcatgcttcttgtggtggggcttctcggggcagccgtaggggacaaccatctcaacgacggagatacggttgaagagagtacgctcgcggtcctcgtacatgtcgtgggtgcgcacgtcggaaatgacaataccttcacggtagttgaagccaatgtgcatcttgaagttggcccaggacagctcattgccgcggaccttgaaagagacaccctcgggctgggagatatcgatgggcttgaggcgatcgtggttgtacttgtcgctgatatattcggggaggtagttgtgctccttgagaggggcagcggtccgctcgccgttgacgtaacgaatgtcaacgctgagaacctcctcggtgtcggtgtcggcgacaacgctgaaatccagagggtgggcatattggttatcgaactcggcgttgcggtagtaagccagaccctgctggaggcggtggtcgtatccccagcgctcgtcgatgccgatagcccatgcgtcaaagaagaccttgctcatgtcggtaattccaatgtcattgcaggcccggataacgcgagcgtccttgcgagcaacacgctccatcacatcaagatcctctagggtgagggtaggcatgacatcgtgaacgtccttccattcctcaaccttgccggtggcgagatttgccaccacctctgcgatcgtgttggtttcggggacaaagacaatggcgaaggcacgacgggcaggagcggggacggcgccagcgcggaatgcccggtattctgctttgataggttcacggagtgtgatgcagttgaacttgacaaacttggggttggcgtattcccggatgatctttgccgcttcgggaatttccttgatagacagttgatctagggttttgagttagcggagctctcggattttacacagaggacatagcatacctaacggatgaggagtgccttttggcagcatggcagcggcggcaacactttcataatccccgtcgcggaagattgtgtagccaggaattgactcggtatcaggagcagacgccatgatgaagatgtgaaaggggtatcaaggggaaggagagagttgtaattgtagaaaaaccagaagttccattccaaagctgcgatagaccttatatagctaatcgaccttgaacgtctgatcgaatttcgccgcatgtaccttcctaatcgggcaatcaagaaatatatctataacctaagcagctccgacaaagggagcgaatggtcccgagagtgggtactctggccgttgctcaatttgggttaaagtctggagaagatgtgtctttgcacagcatgtgtccgagactttaattctatgccataatatgctttgcgtaaagtgtttgccatcgaaattatcagccaatcgcaatgcaacggctcggagcgatgtgttggccacagcctttcgctagtggttgacctaataaagcaagtcttctgagaaagactgtgcatgggcactagaggaaaaacctagcccaatttgacaatatctgatctcttagacgaattaggggagcatgcgactggcagggttggtgatgccaaggcgttaaatcaagcttattttcacgtggtcttgatgacataatgtaagccgcatccctagcctggggcagcccatcaaagccgttctatcacacatgaccccccctgttttactgtgtcgtagaaatgatcaatatccccattacatatggaaacggacgagcaactcgttgaccatatctttaacctaaacacatgagacagcctttgggtggacttgcctgttttgggttagcggctcttgctatcagtgactggggactcgtcaatccacgtctatccacatcaagaaacaccccactccccaccgttttgaacctcagaaatctggagctcggcctttttttaggtggagtcgataaatgtatcccgataagctacccagaatggcatgtccatgcgaagcaattgtcgcaaattacatagagcttgaagaaatagttacaaattcatctcctctagcttcactgtcttctccaaacaacatcgcgaagtacatataatcatggccgacttatctgttcagctcacagcccccaacggccacacttggatccagcccaccggcttgttcattaacaaccagtgggtcaagtcttcgaatggcgagaagattgctagcattaatcccacgtgcgtgagaaattaaaaactaagtgtccatgtcttaattccctaactgactggcgatcgaacagaaccgcaaaggaaatcacatcaatccacgcagcttccgccgaagatgtcgacaaggccgtcaaggcagcgcgcgccgctctgaataacccctgttggcgcgacctacccggttctgatcgtggcaagctgatgagccgcctggcgcagcttatcgaggataatcgcactacgctcgccactattgagacaatcgacaatggaaagccgtattccacttcgttcaatgacgacctgaacgagaccgccgagacccttcgttactatgcaggatacgccgacaaggtctttggtcaagttatcgatacaacaccggataagttcgcctacaccgtacgggagcccgttggtgtctgtggccaaattatcccgtaagttctgagatcagtcatcaaacaccatcgaagtcaattgctaactatggcgctaaagatggaacttccctctcgccatggccgcctggaagctcggcccggccctcgcctgcggaaacacagtcattctgaagccagcggagcaaacccctctctcagtcctcttccttgccaacctgatcgtggaagcaggcttccctcccggtgtggtgaacattgttaacggacttggcgccgtcaccggagccgcactcgcctcgcacatggacgtggacaagatcgccttcacaggcagcacggcgacagctaagcaaattatgaagatggccagcgggaacttgaagaatatcaccctagagacgggtggtaagagcccgctgattgttttcaacgatgcggatctcgagcaggcggttgaatgggcccatctcggcatcatgtataaccagggccagatctgcacagccacatcccgcattctggtacagaacgaaatctacgaccgcttcttggatgcatttaaggcgcaggtgaagactgtctccaaggtcggtgatccgttcgaggagtccaccttccagggcccgcaggtgacgcaggctcagtatgaccgcattatgtcttatgttgaggttggcaagtccgagaaggccaccctagtcactggtggtaagcctttcactgttggtgatggtaaaggtttcttcattgagcctactgttttcgccgatgttacgcccgagatgcgtatctaccaagaggaggtctttggacctttcgtggtgatttcccgattcagcgaagagaaggatgcgattgagatggccaatgattctatttatggtcttggaagtgctctgttcacgacaaacttgactcgcgcgcatcgcgtggctaaaaggattgaggctggtatggtctggattaactctagcaatgacagtgattggcgcattccattcggtggcgtcaagcaatctggtattggtcgtgagcttggagaggctggtcttgctgcatactcgaatattaaggccattcatgtgaacatgaagtcgaagctttgagaacaggactcgaagggcttccgaatctggagggaggacacattatattgtacatagcaaaatcgaaacttccatatgacaaaaatggatatctacgcaccttttctatctttcttttcatctggtgctttagttgaacttatctgtgcagagaagagggtcatagaaaaactgattttatgtgaaaagaaggaaatatatttgaacaagttgagcttttagttagaacacgaataaccacatcaaggcgacctcctagcagttactagtggaaaacaaattcattcagggcaaattgataattcaaagagactcgtgatttttgatcgctgagttggattagggcgcttgatgcaacaatatataatggggaaacctctgaatgatgtcaaaaccaagggattcattaggtgtttgcccctcgcgcaggacttcggtccacataaatattcttagatctgagcttctttatacattttatacattctactattcctatattcacaacgtactgtaaggtagatctcgacagctctacggggctcaactcaactggcaacgcatttttctaaactaaatgaaagctgatctatatacgcaaagcatggatgtcaatatatatccaattgacatcccagaaaatccatattttacttgacaaatccgaattcaccaagcgaaccgcatgtccaagaacattcgcaacattggatgaacctcgagcgactcgatccaagaaaacctctcatcgatcttccttttttggctcagggatcggatcattcggaaccgcatgggccatgatgacatgaagattggattcctcggtgttgagataggtgcgacttccctggacgaaccagaacgacacggcgatgacaagcatgacgccaaacacaccaatggcgtaattcatctcatcacctgtgggattaggcgcggtagggaagaaaaagaaaacagtcgtcacactgcaatacacaagggtgacccagtttaccggtgcacccagtctcccaaggttgaactcgccaccaggtgggagtttgtctcggcccatcagcaacagagtcatgacaggaagcccgtatgagatggtcagggcgatggtactaacgctgaggatggcgttcagcactgtctctgcaaacaagaatagaattccaaccagtgctatgagaaatccctggaaccagagtgccctgacgggggcctcccagtaaggactcacttccgataggtaggtgctaaaggggagtccaccatcgcgggcaaagccccaggtgaggcgggatgctgtggtcacgatgctgactgcctggcctaggccgttcatgatgaacaatgcaatcagcactgcgcctccagtctggcccacggtttcttggacgagttccataaacggcaggccgctaggcgagtttaccactgtattgacgtcctgaatacagaagaggcagaccaccatcaatatgaaaccgctcactgctccggtgatcacggcgaggtaaatgactttcggagcgttcttgcgaggtgcagggatctcttccaccaagtgaatcacggcgtcgaaggcagtcaacccatacgcagcctgcactagaccaataaaccagacaacgccatcgggccagccagtttggttgatccatttcccaaacacgaaagaggcgggctggaaggagagaccgtctttcgttccaactgaaataagcagggcaaggcagaacacaaagaatagtccaaagaaccagactccgacaaaattgttcagccacgggaggaatttctccctccgacaacccaccacattgatcaatgtgagagcaaagacacacgcaatataaaccacaaactcaagccaccccttcgacgcaccagtccaggttggactgaacatgaccttcataccgagaaggaaattggtcataaacgccacctgggaggcggccagtgtccaccacccaaagacattgatccaagcacacatgtacgagagaaaacgtccgaagtgtgagtcccagagacggtagatccaataggcctgtccgagggcagtgggcatgctgctacatatctcacccagcgagaaggcgacacaggtgttgcagaatgtaacaagagacagtccccataggattgagacagggccaccgttgatgagaccgtcggagagatcctgtgcaaaggttgaccatgttcccagcacgcagaatgctaacgctagcatgctccagatgttgaatttgcgggcgaggatttgctcgtggccgaattccgcgaggtcgttggcatcttgtgtgtgttggtcggtaggtttgacggttggttcgttttccgcttccatttcgagggacgggagggttcagagcgtgcgagtatcaagaggatttatagagtattcactctaggtatttcccagcaacgtaattgacgccgttgtgagaaagaaggacttgtctccgggctgtagatcgtatactcctcctgaaggcgatattgaaggtccaataatgaggtcactgaagcagttgaatgaaccggatgtcccgtatgcccattcacaaaggttttgttgttttttccgggaatcccatggcgtcggcctccatggccatagaggagggcacgttcactggatattcaccgagtggcccacatgatagatctaagccctgaaggcattttacacgattaaacgacacatacatactgaagatctgtacagagatccagttttgctccagtttttttccaccccacatccgacgaagattgaggaatccctctctggaaggtagatgcggtttgttacgtgcagtgctaattatatcgatggtatttggcgtttgctggatatccgactcgagggatcaccgcggatgttgttctgatacctgattccttgactcacggctatcagatcctcccgaggtcggagttagtcgggttaatgcggctgcattcattgaagcccaacggtcggaaagcctcgatattgtctcttggaattgataattgacttttcgacaagtacaatttcttcatcttcacggcaggactaaaccccggaaattatagaactgtcggcggagaggctgaaaaagacaagcttgtttctcctgcatctgcatggaccttccaaaagcggcaagctcgccttgaaatccggtcgactttgaaactggaccagcttggacttcacagaccatgagaatgagaatcttttttaagaatgcgaggaaactagtgagatatatccctggcagtaacccgggaagcactccctataggagtttagaatgcgctcactgagatctgtgtttggccaatcacagtccgagtatgcgcatagcaccacgcccgcctcctcgcttgcgtgagtatatatgagtgaattgtagttgtaggatttccagggggtttctgtccttgctcttgttttccttcacaacagttctctcagtagcatgccttcgaccgagaagcaaaaggacctctcccggcgtcatcgctctttcaagggatgctggacctgtaagaaaaagaggattcagtgtgacgaagcgcgcccagcctgccaaaaatgcagttcccgaggtctggcttgtgagggatacgagatccgattgcgctggggagctggtatcgcctcccgggggaagtactcgggcgccgagaagcccgtgaaagaatatataccctcgcggtcgaaacgaagattggatatacgagacgagggggacagatgttttcctggagatgaagatcgtcagcctgctgtggtctcgcaacctctgacaaaagaaggtattgctagttcatgatggtctttataattctaaactcacacattcttctagatcaaaatcaattagttgccgaacgagcaacggtcaatatacctaactcatgggaaccgaattctccacgaaactcagctatcaaaaagcactttgagatacctaaatccttagccactttgagtgtaactgctgtggctgtgaatggtcgggatgaagatatatcgagtcaatatgcccagaacgcgggccgacggagtatattggcttgacctgagttttcattcttggttttgtacttgagcactgcaaatcactttttttttatcatgaatttgggactaggtccacagcgaacagactgagacatatgaaattggtattaccatattaaataactatatcctattcatcctcccggatcgtctcagtacctcctttccgccctttttcttgtaaatgatcagtcagctgggaagcttcagatcgatggcctggtcgccgggtatccaaactatcgaaagattcatagaaatgggatgatcggccgctcatcacgttttcaatcgacagtggtgacgacaatgagagtgacgatggacgtcggctgtgggctgctggataggagtactccgaacccgtctcactaggagtctgcggtgagacaggagactgagagcctcgtctcggatcgaggttgggcccacgttcgggttcggacttgggaggtccgtcgtgggcataataggcggtgttgaatgacgttggaagctcaacaggtgatgaatctggtggatgtcaggtttagtactccgcaatatctctttcctatcggggattgaataaagaaagtcattaacataccatgcatctcatatagcgcatctcctccagattcaaccgtgccaggggtcacaggcgagatgagagactctggcacggttgacgcctgcgtcatcgatggttgtgttgtcgacggctgcgttcctgtggtctgcgtcgtccgcgccgtctctaccgtctccataccagtcgatgaagatactggcccaggcccaggtgcggctgggccgctcgcatacatccattccggaggaaggttctgaggttgcgcctcagcagcttcggatttagcctccgaaacctcgtgtttacggtgacggcgacgataaagcaagaatccgacaaggagcgcaattatgagcagacccaagaccgcaccgattactccaccagcccacccggggaatccgctgcccccgctgctttcttgcgcggatgtactggcgctgccaccgctgctggtgctgttgctggtgctggtgctattgtacggccaatatgtctcgacagtcttgccatacttctttccaaaaatccccgctagagagctgttcgtccatgacgatggggcggtaatggttgcacttccattggagctaataagctgtcagccatgatgattgcattatgtactgctgaggtatactcacttgccgcctatcagtgccgtcacaagatctggcactttatacttactccaagtcgtgggatcatattcatcctcaaaggtcaaggtgttgagattgaaattgacaatgataccaccctccaggcaataagttgagtcgacatgctgccctccaaccgctagcatttgatcgggatatactttgatgcattggtgaccgctgcgactgtgtgtgtttgtaccattgtatgccttgacccacttaaaggaaggcagagacaatatatacacgtcgtccgacggattggcgttatagttcagaccatcgtatcccccatagatgtaaatattatgagatgacccatcagccgcactcgcaagcacagagcagaactccgtcagctgtggcggtatatcacccgtcgtgttctggagataccaggctttactctcgacatcgaaaacagaaactgtctccatgaacgtcgggctaatccttttgctctccgccgtccgggttgagtttgctttttcattccggaaaaactcaatgggttcaatcactccgccaatagccactaaaaccccagactcagatataggtacccagaccagttccgcccttgaacgagcaggaatgtagctcggcagtgtgttgtttgtccacttcccatcgctcatcgttgacatgtcaagggtgattaacgtgttggccgtttggttggattgaagctggtttaaagtgaagtcgccccagtccgccgcgcgcatcccactgaagtaaaagcccaagttctcgcttggcgcagatgcggcagcaccattggttatatatcgcgtgacattggtggaaaggtattcttgttgccagttgggtgcccacgagcttctataggcgccatactgatgcgcggcatacgacaggacttggttagaaggcggaggagcagagctatcggtattggggagcatgcctctgtaataaataatctaagcgtcagtggtttcagtgatttattagagagaggagggacccctacccatagagatagaactcgttgtcgttggcaaacatcgttccatcaacataattcggagctatgctagaagcaccgccggcgacagacatgttgctgaggagtttcataaaatccgatgtagtgttgaaagaagtagtgaggttcaggtaataaatggtggcctccaaatctgcagctagttagctatatgcagatatgaagatccatttgattgcgcctactgttatctggctggggctcgacacaaccatcgtcaaatcctctgcagttgttagtgtaaatcagtattgaccgtggggagcctcatacttctgataccatagctcaccgccatcgaggtagattgtatcgcgcagaatattggctacccgtgtcagtaagaagacaactatcggaaagggaaacaagaaatgcttaccacgcagaccttgccagttgcacatggaaacattgatttgagtcgggaatgtactgcatacggccactgcgcagtctatcacgaccagcagcgtcagcagcgtccccaaaaacaagctcatttttcaattgaagctcatcgcggagggtttccaattttcgatgacagatccaacaatggaatcctccaggatttactgcagccatcttgcccaaatggaaaagcgaggaagcggggtctccgaccttgcgatgcgcctttgttgttcatcctctttgttgtcacctgcccccgccctgaatacgagcagccaatgagagaagcaccaaggattaaacgacgtgtagtgcgcccgttcagcttatggccataacgccatgatcattaccatgatcgtattgctgcatgactaggatcatgcactcacggagatacagctgaatcaactggagctgccacattgtgtgctcgagttagcccctgattgcggtccataactccgtgtcgcgggatattttgcatttccttgtaccttgtaccgcgagatcgtcatgactatgctgcactgtccgagtcaatatccaccagagaagaagtctgagcctcgaacgaaatgttgggctttcttttattcaaaaaggggaccgtgcgtgtgttatgtattgggtgtcttcccattctgtcgaggtattttctttgtttagcttgtttaccttgctggccatcgccggaagaatttttcctacagacaagcaaagatgaaggtcgcggtcggtcggttgtcgctgttggcgattgtcttcggtttggtgacatcaagtcacagcagtctcatcaacagagccctcgcgctgccggcggaacaaaaggacgcattgaccgctacaattggagtcggggttacactttggctgggtgatggcgagtcttgcaccgctgaaactgtcacccacactgttacgcagaccggagatgtttctgcagctgccaccaaaatcatcaccgaggctaccacctacactataagtggttgccgaaatgcccacactctgagtgccattcccaatgtcggcattggacccgtggccgttgctgcaaataccgctagggcactgcccggaattgctcccataaaaacgatcacagattacacaaccgaggtgattacagcgtgtacatgcacagctaacttgactgttacgacaaccacctccagcgtacctgtacctgtgacaaccacctctagtttatcggtgacatccacatccagtatacctgtgacaacctccagtgtacctgtgacaatctccagtgtacctgtgataaccacatccagtataccggtgacaacgacctcgagcgtacctactaccagctcgagtatacctgtgacaacctccagtgtacctgtgacaatctccagtgtacctgtgacaaccacatccagtataccggtgacaacgacctcgagtgtacctactaccagctcgagtatacctgtgacaacctccagtgtacctgtgacaatctccagtgtacctgtgataaccacatccagtataccggtgacaacgacctcgagcgtacctactaccagctcgagtatacctgtgacaacctccagtgtacctgtgacaatctccagtgtacctgtgataaccacatccagtataccggtgacaacgacctcgagcgtacctactaccagctcgagtatacctgtgacaacctccagtgtacctgtgacaatctccagtgtacctgtgataaccacatccagtataccggtgacaacgacctcgagcgtacctactaccagctcgagtatacctgtgacaacctccagtgtacctgtgacaatctccagtgtacctgtgataaccacatccagtataccggtgacaacgacctcgagcgtacctactaccagctcgagtatacctgtgacaacctccagtgtacctgtgacaatctccagtgtacctgtgataaccacatccagtataccggtgacaacgacctcgagcgtacctactaccagctcgagtatacctgtgacaacctccagtgtacctgtgacaatctccagtgtacctgtgacaaccacatccagtataccggtgacaacgacctcgagtgtacctactaccagctcgagcgtgtctggcacaatcaccacgagcgtgtctgagactaccagctcgagtatacctgtgataacctccagtatacctgtgacaaccacttccagtgtgcctgtgacaactacctccagtttatcggtgacatccacctccagcatacctggaacaacgacctcgagcgtacctactaccagctcgagcgtgcctggcacaatcaccacgagcgtgtctgagactaccagctcgagtatacctgtgacaacctccagtgtacctgtgacaaccacctccagcgtacctggaatgacgacctcgagcgtttctgacactaccagctcgagcgtgtctgagactaccagctcgagtacacctgtgataacctccagtatacctgtgacaaccacttctagtgtgcctgtgacaaccacctccagcgtacctggaataacgacctcaagtgtacctacgactactagctcgagcgtttctgacactaccagctcgagcgtgcctggcacaaccaccacaagcgtgtctgagactactagctcgagcgtgcctagcactagcgtttctggcactaccagctcaagtgtacctgtcacaaccacatccagcatacatacgacaaccaccctaacaacatcgaggactattactgactcgactgccactgctccggggccgacgacttcaccatccactacagtaacaaccagaaccacttccagctctgtaggtgttaccactattccagtgtccacaacatcagcggctgccaccgatatttcgactgtcactatcccaaataccactgtcactctcccgggaacaatacttccagggaccacagtcacgacaatcattactgagactgccactgcatcaagtggtagtagcactttacccgggtccaccggtaccacaactgtcacaagtccagaaagtacagtgatcagtgattcaacgatcattattggcactatcactatcccaggtatgttatcacccattggacgtcaagtattattgcaacagctaacagtatcagtttcgcaaacaaccaaaacaatcactcgtactctcaccgttaccgggtctagtgcgacatcgacccagagccctagcagcgctacgtcggtgcctgcctctgtatgctccagtctcatcagtaatccatcttacacaccccccgccgtgttgccagatgactatacctggggctgcgcacccggatatctctgcaagcccggtcatgcaggtgaccgctcgaattgcaatattgaagcaggtcttcccgaccccggatacgtctgcagtccctcagactgcattgtggctccgcctttagacgttcatccgtcttggcagtacaatgtctcgaacatttattacaacctcaatccggaggacttcggtctcaattattctatcttcgaagacccactggcagccaacaataagcgcgacatgtcgttgtgggatttcgctgtcgcccaaaggatcaagagggccgacataacgaacatccctacagtctgttacaatgattgcctcgatgctgcacatgagcctcaaatgcttggaaagacacctgagctctgcaagagtgactcggcgttcatggaaaacttggatatttgcgaggagtgcattaccaacaacgctgaatccggctctgatcaatattcatccataatgctgccgacttttgcacagtggctgaatttctgctccgatatggtcacttccacaacagcacaaagtgtgaccagtactcagatggacactacggcgacgagcacccagattaccgctgctaccagcacggaaacatcgacagcagccacggtcacgagtactcaggctagcagcgctgaagctagcagcactgaagctaccaccaccgaatcggcgaccactgaatcggcgaccactgaaccgaccagcaccgaatcgaccagcactgaaccgaccagcactgaaccgaccagcactgaaccgacgagcactgaatcaacgagcactgaatcgacgagcactgaatcgacgagcactgaagcggcgagcactgaagctaccagcattaaaccgaccagcattgaaccaacgagcactggaaacacaggaaatgaaaacacgagcaccgagcccacaaataccgagacaacgagcactcagtccgacactgctaccaccgggaccgagcaaatatccagcccagagacaactcaaccagtcactctcatcgccatctcagcttccggttcaattgtgaccacctcggtatctggttcgcttgtgacaacttctttctctgggtcttttgtgacaatctcaacatccggttccctcgtgacaagcttagtccctggatcgatcgcgacaacatcagtatctggcgtgcttatcacagcatccttgcccggttcgatcaagaccgtatcaagcactctagggacagagactggcagtgaaagcacatctgacaatgctgccagtagtccgtcgggctcggttcagacgagtcagacgagtcagactgattcggcaacgacctctaccttttccccggcctacaattcggcaggatcttggaatatccctagtgttggcttaattggtctcttgtggactgctcttgtgccactcctctagaattctctttttactgcgtttggttttccatgtcagatgtgtgtgtgagatatttggtcaattttggaggtagttggtggatttattagtccattttaataaggatgattcaatgaaaacgcataaaggtcaaagaaaaacactaactagggtaactatacattagtgcttatatcatgtttttcaagtggctatgatattcgaaccgcctttttgctgttgtggtctcgtgccgatcacatgccgctacagtcttctactaattgctctctttcttaggaatacacaccaccattcctggaaaataactaggtaaagtgagtgaccgcacccctgggataattgtgtactgccacgcgacaccgctcaggaaccttggaactttattttggtgactagtctccattaggaaatcaagagtataaggatgagagatttgttgatgttcagattactgagtacgggaacaatgagattggctcttttatgatgtatgcaaaacctttcacaattatcggatgatctgagccattcgaagcataagtttctcctatcgagcaactgcttatatattagcgtaggttcaatagcaagctgaacatcggcttcttactagcttctgttgattcaaatcgacactaacgctaatcgacttggacagatagacaagacctctcggtgccaatttgaagtcatgcttctccttcatctccttcaacgtgatgggcagccggagctcacggacagtaaccatttcgtaagcgaaatcgtagccatcccagtctttgtgcttattgttgaattcggcattacccagcccgttttcttccagtggagcatcaccggcattccgcgtccgggcgaaccgtgtttcgcagacatgggtgatgctggagtgcggagcagtccgataaaaccagattcgtttcacactgggtctgaggcaatattttcgaaactcgtagttctttcttccgtcggcgatttgagtcatgtaggggtcctgcatcggtaggatgacatcgctgtgagaagggcatctgaccccagtctttgcgcgggacatgagggaactgttctgcgaacgtatgggcaaaaataagagggagattgcaggatctcagatcgagatatggagtgaagcataaaagttcacagtctacatatttatctggagtcgtacaagggatctgtatgcgcctttcccattatcgagggtcatgggacttagcatcggctggtggcaggaatcttggcagattagcaacaggttgaagtgactttcaggcacctgctaccgactagaagccttggttgtgcagactgcatcgtcatctatcgatttatctttcttaatctcacaaatagatttgcatagcaaaatgagatggatgtattctatgatgcaagaaaattcgtgattgatcgtcaaatgcctcggaatgtggaggcggtgatagcggtcaggtaatatccaatgagagagttatgccccggtcatctcctgcaagtggtcaccacatatccctgaaatggccaagcagcgcttgtcagacattctagccgccgccgatgtggatttgaacccttatgaagctctttacaagcatttccatacgcatcccgagctctcgctacaagagaaggccacatctgaaaggatcgcctcccatttgtgccaactcggatcctatgaggtccagacaaatataggaggttacgggctcgtagggactctcaagaatggccctggaaaggcaatccttcttcgggccgacatggacgcgcttcccgtcaaggaactcaccggcctcccctacgcgagctcagtgactatggctgatgcggacggcaatgaaaaacccgtaatgcacgcttgtggccatgatatgcacattacatgtctgcttgccgcagctgaagtcctggcccgtacacggaatgcgtggagcgggactttaatcgtactcttccaaccgaacgaggagcgcggcggaggcgcccaggctatggttgatgatggactttattcgaagattcccatgcctgattacgtcttcgggcagcacgtcatgcgaatgcgagcgggaagtgttggttcccggcctggcacgatcatggctgctgccgatagcctgaagatcactctctatggccgcggtggtcatggatcacagccgcatcagacggtagaccccgtactccttgctgcgcatgttgttgttaggcttcagggcattgtgagtagagaagtggacgcgaatgatcttgctgtcgtgacggtcgggagcctgcaggcagggcaaacagaaaatatcattgcggaccgggcggaaatcggaattgatttcaggactgtcaaattggagactcgagagaaaatacttgctgctatcaggcgcatcgttgaggctgagtgtgttgctagtggatcgccgaagccgccgttgttcacaccaacgaggcggttcccgcccaccgacaacgataaacatgtggcctctcaactggctgcctcttttgcagaccatttcgaagactttgacggcgataccccaaggaccaatgttagtgaggacttctccacgttaggtacttctcaggggcttccttgctctttttggttcattggaggaattgacccagggctctgggataagggtcagaaaaacgaaattcccatggaagagatccctgggaatcattcggcgttgtttgccccagtgatccagccaacgatgaaaactggggtggatgcgttgtgcatcgcggctttgacattcttgaaaaagtagccgtggctctccgggcctccctcgacgggttggaaacgtttagcactgcatgtaatgaattgcttgcagatttgattgggaattctcggttctatattgcagtgctaattgttgcacaggtatggcctttttgcatagtgtttattttattcctctgcaatttcactctattcattcccaatccacaagttgtggaagaaaacctctttatttttgatttctcgtccctcacatcaattttcaaagccagccaagaaagacaccacagcagaggcaaaggccttagaatcatcatcagttcccttacgagcatccccaatctgctccaagaacaacgccaatttcgactcatcccatcccaggatcggcgcagattccaagcacatattggtcaggccaaagggatccatttcgtaatgaccctgcacagagagtaccctgcctgggtggtacagtccctgaatagggcagattggagtgcttccaatattaatccacggcgcgggcagcgaaaccggcggcgactcggcaagcgtaacaacagttcccttcgcaaccgccatcacccgatctccatggaacatctgaatacgcaaccgttccttaggaagagcaccgagtgcgcccgggaacaacttcacaaaggcgtgttccaattgaacggtggtaagtccgacctcacggccgaaagggcatttctcaacccagacgtcgtggactgggtcatcaacgttgcggacgagagcgtgcgagatgagctggtggccgaaacaggtgccgaggatgcggacttcggggtattggttgtagactgtcttgatgaatttctcgagcacttgcatccacggtgactggtccatttcgcctacgccgggcgttccgccggtgatcaagactgcgtccactgggtatcgtacgggtatatgatccttgtcttcatggccgcggagagtgtataggtcgggataatggcctcctcggatatcaaacggggtgatcttgacttcgagttgctctttctcggggagcagggtttcgttcaggtgtgttgcagtctcgcagaggatggttcggaagtgggcgctcaagagtcctcgagcctcgtatagtttgcgggctggtatgtcgacgtctaggacggcgatatggatgaggtgaaccattttttcaaaatgtgtgtttaattgatggagggaaaaggtgaaatggagatttcgcacttgggcgtactactacataatataattttcccatactgactccgacgcagaattagacaacatttaggtaagacatagctttgtgggatatagtaatctatacaatataaggaacaaacgacacccagttactccaacagactccaaccactaccgaagtattaggtaaaagctaacatcgtcactcaagatgaccttattttttttcttgatccacaatctctacattaattctaccgaaaataacccgggtcttttctgttgaactttgtacagtctgtcccgcgtacaggatgataatgtgtgataaatcttggatttccacgtgtctcgattgaaactgacagatttgctatgctctgatatactctatctcatttctgatgtcttccacatgtgtatatgaaatatgccgagccgaatcggccggttacgagcttataaaggcttggctttccttgccgctttttgccgagactcggaagcctccgagtcttacataatcattagcatccccactcacagaacagcagccaagtcagcaaatcaccttgactataaaagggatactgtttgaattatagcaccggacccaagtttgaaattggacctatacatgtaccttgtggactaaatcctgtccgagttcaacggagtaaccttggaagcccggagttcccagaagagcggtgaggatagtaggcagaactatattcagttaggagggtgcacctgggatttcaggaaggttacgtatacctccaaaataccatgttattgctatttacaactctttataattatcaatacttgtgtcctaactcactatacatggctagccaagttgtcacatagtataatttgttcgaactctgctgcaattgattattatttgttcaagcctatcaccgcactaggaagataatagtatgcaaaattacagggacaagtaatagtgttgccgagcaatcgatatatagattaatcagaatcggagctatttcttggatcgctaaattacaggtagaatttcaaattaggaagacatatcaatcatcttgtcagccgtttcgagcaaagtgtcggccatgacatccatcttagtatcaaagatgtcaatgcacgactccttttcatagatcgagcagtaagcaccacggaagctgattattcgagacaagttagccggatatcttcctcattcggagcaacagcaaaacttacccagctttaacagccgcgctcacatcccacatatgcgccgccacgaaccacttatcatcctcaggctcaaacttatccagcataggctggtaggatcccatcgagggtttgaccatatcaagcggggactccctctcagattcatacttcatgaactgatggcaactgacgaggttctcggcgggcatttcaaagccggcgcgcttgaagtagccaccgactctttctgtgtcgcccgtggtcaagcaccagatggtgaaaccgttcttcctcaatttctccatcatggcgcggcagtctgggcgtagttccagcttcgaataggcatcctgacatatgtccctttcctcgtcggtcgcgaaggatctcggattttggataccggacagatataagacacggtagaagagcgccttgaagactttcttgtatggaacgcatcgcttggacatctgaagcatcagagactcgagctcggcggcttgcatccaggcatatcctaaggcattggccgacaattggtttgctcgcagtcgtgggccgaggatgtcttcgatggtgtcgataaagaagtcgaatgacacgcaagtgccgacgacatcaaagacggcatgcttcctgggggagactgtgttgggggaaatcatgttgtgtatacaagatgttgactgatgattgaatgaaattgaattggcagacggaagggattcttgggatacatattgcccctggccttctcatggtcatttatttcaatgcccttcgccaactccactggcaaccatggttcaatcattgtctgactccggcacaccgctatccgataatctagataagatcgaggtctactccgtgatgcgtagacagtggcggtgtgggtattccactccggggctaacgatatctggtaatcagctgtcaccggaccaggcccactccgtatccgaactccgtcaggcgattgcattgtttttgagattcaccggagtctctgccgagaaccgagatcgaaggaaagggggagcatctggggtatcaaatctgaccaagtcgatgttgcaacgaaaggtgggcgaagtagaaactaatgcgactttgcctgggatctttcagctataatttaaagagtcttggtagtttgatatgaaagagctgatatatatattacacagtttgaacagaaaggctggtggttcggggtaaagcgagcatatggcattaggaatacacttattctcatacttggagcagtctcaatatatacaatagattactattcataaactcaacacatagaatctctgggatacatcgaattcattgttacaaaatatctctcaaagtcaggtagatttgaagacccgaagactaagctaagatatcatactaatccacgctcagtcccataaaatgttcagcttgcgaaggcctttctttggttgtggcagcggctctgggttgcgattggcaatatcaataaacggttgaatgggtatatcttccagggggatgatctttgtcttgtgaatcaacttgtacgcaaaataaaagatgaagaagagaggaatattgatataagaggagacgaatccttcgtcgctccattgccctttgataaaagtcgagtacccgccggtgatgagcaggagactgagcatgatcaacgaggcccaactgatatatggctggagcggcgtcgcccacggtagagacttgcgagagattccttgtttcttgcagccgtaataaaagcgaagatacgtgaccaggatagtgagccagttggtcagagttgtgatggagacaaggtcttgcagccaatcaaacacggtgttggcagttgaggagagcgacatgtatgccaggcacatgaacagaccgtagagcgaaattgcgacccagggaaccgagaatctgttaagtcgagtgaagaacttgggggctttaccgtttaccgccagcccgtacaatactctcgaccctccgagcatgttcgagttgcctgaagaccacgccgacgtgatgatgacagcgttgatgattgatggcaccaccttgattccggctagggtagctgcgatcacaaagggagactcggaagctgtgccactagaactgctgagtctaggttcattggaggggaccacaaggccgaccatgaagattgagatgactaaagggaagacgtcagatttgaaggattttctatcttttagaatcaacataccatagaaaatcaatatacgaaagaaaatccgcttagccgcctgcgggatagcatgcctcggcgattttgtctctccagcggcaacggtaattgtttcaatccccgaataggcataaagagcactattcatagatgtccaaacaccgagaaagcgaccaagagagccaccgatgccaaggtactgaacgaaaggcccagggtggcgccagtattcaaacccgatggttttatggtcaggaccgccaccacaggtaataacaagagcctggttaatccttgttagcaccaaagccggtcaattcagtggcagaaacttgagcttaccattagattgactccaatgatcagcaagatcttcatcaaggagaaaccgaactcgagctccccgtatactctcacaaaggccatagaggtacacagcatgaccactccaaagatactgatccaaatcgcgctattgaggtcagaccagaactgcacgagcacagcagcggccacaatctctgcagggatagacacaaggtaggaatataccacgttgtagccgttggcaaacgataatgccgggtcaacaaagtattcggcgtagcggactattccaccgttcaaaggaacaagtgtgcccatctcgcccgtcgcaagggttacagttccagcagcacagcccatgaccaagtatcctagaaaggcacccaggggaccagaacgtgagattgctcgaccagaactgaggaagagacctgttccaatggtaccggccaaagcaatcatttggatgtgtctctgatgaaggccttgcttcaaggccgaaatctcttcgaagtctccgacatattcatcttctggttgaacaggcgactctgggtcgtgtatcatggtcttgacgtctttgtcgaattcatcgacagcgtcggtggaatgatcgttgtgaaaggtcttgattgtggacatcgcgattgacttgtattttctcttcttgtaaaaaaaagaatgtcggcaatattgggccgtccttgctatatggcgcagacctatgtccggggatgattagcctcgacttatagttcccttattagtggccagatggctctgaagtcaccgtgctaagcgacacattctttatctgtacacttaactatgcggataacatgatattgaaattgacgtcgagggtggccttccaaaagcagttagagggatgacatggagaccttgattggaagatacaaggttgccagggcccaatcagcaggtttgagtatctttgagacaaacgttgactgagggatgtgagatagcagcgcacgggtgatagatggggtgacgatcaactccgcagaactggaaggccgtaaaacccactccgtgagatagtaggaagctccgagagataagataactatcgtggcatgacttagaatagcggctcggagtaccaaataacgagtacgtacggagtaatcagaaaacgttgagccagatagacgtgctgggtgtttaactaatatgtcatttttcattcgtctggtgttacaatgctatagagtacatagattgaggattaaaggaactttttgcaggtcatcactgttatatctcgaagaatggagcctttgtttgtataggttgtacaagactagataatgataagaacagtcaagctgcataactctctcaatgtgcaatatgcaataaatatatctcaacgcttgatgccgaggacatcacccccgacaggaccgttcctcgccttctcaagcctctcctttgtcgactcaaacaatctggggataccagtatcttcaaacttgatcccattctgaaccatcttagcaaccccaagggcagacaagaacacctgaggcattccatgaccattgaagcctgcgagtacaaactggctatcctctccaggcacggtgccgacatgggggtgggaatcccagctgtagcccatgatcccggtccaaactttatccactttggccccgctgttttcccagccattgaaaaaccgctgcataaaaccatcgtaatggtctttgacctcctcgatgaggattgaatcgtccacgctgttgtaccatgaactcagaacagggtagtaaagcaagttggcgccaccgacaacaatgctgccgtcggcgcgagggatgagatatgaaacaacgttgtcttcttcgcggactatgtaggagttattcagcagaggcgctttcgtgccctcgggaactgaaatatgagtacactgtcctttgcagggaacgatggcttcgcggtactggggaagaagacccgcgatgtaggcattgttcgcatacacgactttccgagcgacggtcgtgcctcgtggagttgtaataataaagctgcctgaagattgccgactcacagacgtcaccggggtattagtctggagattgaccaagccagtcttgaggattgaggcggtcagatgcataattaatttgtacggccacagacttgcggctgtgaaagaagcagatgctttggcacctttgacacccgaaataccctccgcattcttgccagacacaaagaagacatctttcatgtaattcagatcacgggataccagcgcgtcatacatctgttcggccttccgggcagtttcctcgttggtccacacatcgatagaccttgtgagggtaaagtcacagtcgattttctccttttcaaccaaggactttatggcgtgtatatgtgcgatttcgaactccgttacctccagcgcgcgttcaactcctgctcggtcgatgagcctggccatgggggtgtacatgtcaggccgtaggtgaccaccgttgcgtcctgtcgcacccgaacagacaccccgtgcttccaggattgtgacagagagtttgttgtcactggcctctcctttgaccaagtggtacgctgtactgattcctgcatagccggcgcctatgatgacgacgtcactcgatactggaagctcctctgtggtccgatggtcgtgcagttcgtgaatgtctcggtgccaaaatggcacagttgcattttcgacgggttgccgggatgcattagatgagtcggttggagacatagtcatcggagtagaattgattgttgctgtttgatttggactcggaggacttgcgcaggttgatgagtaggctagtcgatgacctgctttgtcggcattaaataatggccggagtatcaggttgtttgatcattcgatgaggacactttagcaaatacaccgaatgaagataacgaactccgattcgtcggtattcaataatgactgatcaacgccgtgtctgcccttatcaacccccgcaaaccccgtgtcgggcccggcgtagtccactccgaaaggccaaaaagaactccgaaagctgacccaggggttatcttatcagtttgcccctttgacaaagcatagtcaaaggctttaatgtagtcaacaccgatggcccggaaatgtcggtccgttgacagtgctcaatacggaaaaggtggattaccttggtcaagccaaccaccctgagtccagtcaacagtgttcagccaatccatatcatggaatttgttcatctctgggtcaatatcctgctctctgcctatcgccataggtagattttgccctggagaccgctcatcttgcgggccatattgtctcagggactgctgttcgcctggcaactcttgtgcttgcatgccacacgatgaccccaaagaatcaaacacagcgtcgatgattctttgtataactgtcttgaacttcttgctaagctgcgcattattatccgtgggacgtatccagtcaagtaacgctctgaacataaccagaatctggaccacttccgaccgcgagaatttaacacagttgctagcggcggacgtcgatgtgagctcgttttgtggcgaagatggggctagattacttgctcggagaagctcgacgcatagaattcccgcacagggcattgcgtatgatactgcctggatggattcagttagtataatattctcaattcagaacggctaggttcgtcaaagacttacaatccagtcaaaggcatggtggaattcctggagttgatcgcgcttaagccaaagagacaggataacagacattgtctcttgggcgatgtcaaacaagtcttggccaccgctgaattgccgcgatacaagtaggcgctggaggaggaactggcattgcaatacgtcgagttgtatgcgggtgataatatagacttcatgggcgcttcgttcatggcattgtgagcttgactggggccattcggagtttctccgatactgaatgtgcggaggatatgaagcaactatcttccccaactgaacttgtaggtttctacaagaaggtcggagtcagcgaaatgtacctagtatgcaatattgcttctaataacgcactctacctgcgatttggtaaattccgaattgacactaagggttagttccaagattccttcccggataggactaagcatggccagtgctcgaagccaggttgttgtgaatatctggccatttgtgttccagccattcgagtcaagctttgcaatagccagggccaatctttctcggtccccatatacatcttcctcgcttaaatcgagtgggagagggcattggcagtaacgattactgagcataggtggtcgcgcattgaatagactgtggcatttgtcgtggtaatacatcgacgcagcgagtgacgctcggtgttgagagaacggggtgatttcctttgcaggagtgaggcggtggaatcctgcgcttataaaagcaccgcggacagtcccgtagtcgactcgtacacggtcacctatcccgagatgagctctattctatactgccagaattcgtcctgatgtttgcgactcactctcgtcgctgatgatgatgctttgtagtctggtgctattcttcatgcaaataaccatggtatcactgatttcaaaattcccttcacaaagccttatacaggccgcagcacattctctcatcttgtctgcggcggtgtttcgattccgtccatactgttcgggtagatcaaatactggatcccactcttgcttgcatctgaaagcaattccagcccagctgaagaggatcccaatcatttcccatcgcaaatgaggcccaccaaaccagttcatccaggaaggatggtcggaattgcctgcgtgatcacattcaggtgtcgactgagaccttttgtgattgagaaatagatcatttgccactctcaatactgattcacgtgtccggagctcacccagcgcacttgcatattctgtccatacttgttttaaacaccgctgaatcattgtgggcgacagccatacatcgtagatatgatgaattccggccatcagcatgtcacatgtacgagcagtggggaagttaagtagtgttctgaccgccagttccacacgggacctggccgttgaatcaggctctcggcctagctcgcggtggctggaatttgtggcatcgaacatcactgcgccaaaactatcttgattttcaacaaaaacagccgagaagcgggtcgtctcgtgttggcccagctcctcttgaaatagcatgttccgttttgatgcggtggaacgggctgttagccccgagctcgcggcggggctgggatctgcaggagagagtgagatcgctgccgcgaccgaggattcagtaggaatctggaaagcgctagagacattttgagtggtcagtaagtcggcgggcagtgttgtatcgaagtgtatgggggtgtgagaagtcggagggcgacgtttggtcataggagcagggtgataaatgcaattcaaactgcgtaggacacatcgcgaacacttcggacttgcatggtcacagcgaatcttagccttgcgacatggttcacaggcttgcggttggccattatggcgttttcttggttctgcgagcatcatcaagtgtagttccccttaatatttcccagctcggtcatccatgcaaataccagacatgtctagaggataataagaaaacgaagtatggtcgtagaggagattaccagccccaaggccggtggattaagttcggctctatcgcgataggggggatattcacttgatgtcagccaaccagctgcccaggacgagattatccagattgcgtaataatacggtcattattgtatcaaataccgctttattttgcgtcgatcacgatcaagtgtctgtaagtttggtaacacactgtacggaccggtgaactagatgttctgagcacggtttcttcataaatagtggagtcggatttgtccggggtgcatgaaagcctcagatgaagagacagtgggcagtgaaggatattcagagtatggtgtctcgttgggaagagtctggtctgttgtgataaacagagtagacagatacagacgagctgatctatcagattccgcttattaaattccgctcatccctctatggccatatgcaaagggaagattctgtagcatcggcggacccgagatatccgaatacgattgattagccgaatagggaaaagcccgacacttttcttgggaagggcttcacgttgaacgagtctaactaacttggcctccttggagattatatcatcattgacgtatctcctagctccctctgtttcccaccacatcttcacctccaaattccacaacatgacccgttcaatacccctgaacggggccaaccaaatcccaatgaaagaagatacccttagacgccggaatatcaatggctcgcaagtcgagacagttggaaacggccataccagcccatcaaagtcagccccgaagccccaaaagccgccctcccttctccgtcgcagcagggagttcgcgggtaagcacacatggacattcccattagcgctcatgctagccatcctctcggtatatgcgctccatccgaccgagtcgaatccaatttctcatttcatattcctatcttacaaagagccatccctggatggcgaccggaacgccccggcgcagtatggcaagggtctgtgggacatagcgttcgtgtcattctacgtcatcgtgctatccttcacgcgcgaattcatcatgcaggaaatccttcgccccttcgccgccgcgcacatcaagtcgcggggaaaacagacccgcttcatggagcaggtgtacaccgcgatatacttcggagtactgggtcccgtggggttgtatgtcatgcgccagacgccggtgtggtacttcaacacgcgcggcatgtacgagctcttcccgcacaggacccatgcggcggagttcaaggcgtactacttgttcgaagcggcgtattgggcgcagcaggcggttgttatgttgctggggatggagaagcggcgcaaggacttcatggagcttgttgcgcatcacattgtcacactggctcttattgccctcagctatcgctttcactttacgtatatgggcattgctgtttatatcacacatgatattagtgatttcttcctcgccgtaagtcgcattcaattcttctggtttccgacaacccgaatattgacaatctcccaggtttcgaaatccctccattacatagccccggacataatggtgcccttctacgcaacctccgtcggcagctggatatatctccgccatgtactaaatctccggatcctttattcccttctaaacgagttccaaaccgtcggcccctacgagctcaactgggagactcaacagtacaagtgctggatctccaacatcatcaccttcgcactgctggctgtgcttcaggcgctgaatctgttctggttgtactgcctgctgcgcagcgccttcaagttcctcctgacgggggagaagaaggacgatcgctccgagccagatgagtctgagattgagcaggaatacaaggttggtggggaaatcaatggccatgctttgaatggcagtgcattgcccaatggcaagcctcagtgtgccgctgatggcgttgatatctctgtcaaggcgccctaacgatgctcgtgtggctttttggtccttcctgtgggtgctcacactgaggagccacatattcatccttctcttaccttgcattgcctttgctgttcaacgattttgaacaaaagtatttgctcaatctaatccatcatgttgccatgtatcatggcgattcgattttctcttctctgtctgaccgttgctgttgcgatgtctcacttcgtacgattagatgtgccatacgatatatgataataataatttagacttgaactagggtttgatcatcgctggtcacatagacaatcattccaaggggtggtctgcaaattgcagaaattatatacgcaatcaaggctatgcccgcacctcattgctcgcgccgtatgggcaaaacagtttaaacagctaacaaaactccaaggctatgtgcgaaagtgtggatctacaaaatgagatatgaacagttttgtatcacagcataatcaagaaaaacgcaggcccttgctaggatcccaggttcccgtttgaggggcacgagtgggctgagtcggggctggtccagctcctgtgcttggagtggcattcggagggttagcggcagatccgaatcgaatccccatttcgggggaccacatccccggcatacctcctggcatgctcggcgtagaaaccggaggcggggctacaggcgcgcgcactggttggggtgccgtgagagggggtgctgtctcagctgggcgtacggtgtgaacgggtgggggtagttgtgatggcacatggatgggctgcgcagctgagtaggcggagggagagtgatgggtccgaggtgactcctgaggttgttggcgcaggtgtggctgagaaatatgcagtgaggccatcgctgcggtattggagatgtctctggttcggggaaatgtaacgtcagtgataatccgtcttagtaatgggtgggtaacacatacgtttccagctggcttgcctccatccgacgttgatggacaaaaacctttgcatcgtcgcggaatcgggctacaatctttgccagatcattgtaaaacttgcgcccgacgtcgaggttggaaatgatctccttatacttcagatatccattttccagatcctgcagtgccgcttctcgttcctttgtcgacgcatcacccttatgagacccagtaaatgtccggttagcttctcggacttggtccgaaagttgatcttgctctcttcgctcttgggctagcatctcacggtccgaatcgtatagcttcagatgctcctcgaacaaatcctcgaactggcttgcttggataggctgcatggggaattcccgctctagtcgagctgtctgtctcaaaagtgccgggtctaaatgcgatccattagtccagttcaagattaatggaaaagaaaatacgtacgaatatcatccgcgcgacctttgtccttcaaagcttgaattcgccgcctcctccgattctccattcgagtgacctcgctcaagcaaccgcgcaaccggttagcctcgcgctcaacctctggtggaatgacaaccctccggctactaggcacaaaggattccaagtcccgatttgtaccagtgagaacgagaaagacagatcgtgaatctcgcagcttgcgctgcacgaggtcatcactgccctgggcggatgtgaaatagccgtcaatttcggtcaaactcctgtagagcttaggcgcggcggattccgaggttccgcgggtccagcgatcggtgccgtatttatggcgagccgcaaggtcctctgccttttcagcagctagaagctcaacaccttcattatacacagccaaatcattgcctttgactctggcggtgtcgtcgatagaccggtgcaagcgattcaggccatcttgctggcgcatttcctctgcgtgcgacacaagcgttggcgggagacctaatggtttttcgagcgcttgtaatgaccctggcaaattgagcgatgaaagcaagcttgaacctgatgttagcagaatttcccttgggtgtggtatttccattgaatacatactctcgcaacttgtcggacatagactccagctctccaatgagagtatcattgaccagtcggtctcgacgatcagtgtagatactggcggcaatgtgaactgcatatgggaccaattttgagaacagcggctgccccaacggaccattatcaccaagcatagagatcgcatcggtaacctgcgaaggtgccttggcgagaaccatgctggcacgttcaatagtcttgagctcagacttgggcggcacagggttgatgtaaatgatatcgttatccttctcggcacgcttgaggtcttccacgacacggctcttcaagccattcaagtcacccaatacagtccgattaatccaccgctgctctttcaacccttcaccgacacagaccaaacaatcgcgcagccgagcaacctcttctccatatttgcgcttctccaggcagtcaagcgcctgtcggaactgagcagcagcagcaaagtggtggtgctttgcagtcatgtggtggatccagtccgtgctaattgcattagacttcacagccaagtcacctgcatccccgtagaagtcagacaccttggctgccagtttcgcaatagatacatccttcagtccatctttaacagctttctgccagaagcattcctggccctgtccgagcaaaagaagttccaaactctgcagggtcacctcatccatatcctctggcggcgacgttcgaaggtctgggatgatatcggttcgaaggtggctcaacactccggcggcggagcagaggtagttacacgcctgtttgagtccatctgcggtagtccggttggtcgcatatgcaagctgggagtataatgcggcaagattgaatatgatattcgctagttcgaagcgcaggttattttgtgagactagaagccatgatgtatttctattaatctcgtgaccaccaaatcggacctcaatccaaaaaaaaagaactcacctggtcgcgaaacattaaagccaaaagccggataccacgaaaaatccactccgacctaaatatcacgccgaccgtcagcttcgaataccaaaatccaagagccaggactagaaaaaatgcgcacatcaactgggaacttcccacccagccatttcagctgagccgcatatgtgaccaggcgactgatgccactgtaatgcggttcctgaacattgatggcttcagttcgtagacgatcaatgatcatcagatcctccgcaaacatatccgggcgttggtcatatttggtcgatatgtattgggtgatcgctgcggaaagcgagacgggatgggaacgccgaaacgggagctggagaatattactgtaggaatagaacagaagaaccagtcagtgtcattcctctcttctcgcactcgctcatatgctgctgggggtactcacgacgccattgtcgctcgaggcggggtttggaagagtccgtttgttttgactgcgggaagttcaaccccaccgggcaacggaatgacgcttcgtggcctgaggcatcaactcaatacttggcctggttaaaagctgtcttcgacacttaagtcttacccctcccatttagcgcttgctgaatgtaaggaattgactcgtcttagtatggactaaaactattgcgcattccgtttccgtcaggcaatgaattaaggagacctacacctatgactcctcgctgagaataggccacgaccaacgcgcccattattgttcctcgggcttcagtgttgatctacctaagtagactcaaaagctgtttctttccaggacaaaaaggattgaacaatatattcttgaccctttacctgaggcactatttccaacgcctgtcattcatcatatgttctcagaatggcgacaccaatgcctcgattcttgaccatgtcgcaaatccgaagccttcatcgcagatttggagtcccccatgcccccctcacccagatagctatgctggaatctgcagtcaatgcgccggtgaataagaaccactatgagaaggatcgcgatgtgtttcggctggcagcgatcctggccgaacggatcatgcagaaccacgcgtttcaggatgggaacaaacgcactgccctgctagcggctgatattttcttgagggttaatggctattccctccagaggtttccatctgcagatgatgcgcacatcgagggcctcgcagccgcgcatgttgcagtcgtcactaagaaatggaccgttgaacagctgtgcaactactaccagtctgtcgcgctgtctttaacctagttcatactgaggttagacagtactacgctgcccgccgaatagcgtgctgaagataatatcccctctagttctatgccacttggcagcacttggctgactcgatcggcaaatccgggccccagctgtctatgtatcagtgctagactgccgaagcagaaactgaatttgtaccattgttagtcctatttatcacaactcatacatatttccgcttaggacggtagtcgtagggctcgtattagactccgactagcggggaaattaggttaggatatggagacgaggataactcggcgactccggaatacaacacattcttggccaacgtataatgcacctatatatggaagagtcccaccgaagccaaaatcctacgtgtcgtgggagaaaaagcagtctagatcggtcttatcccgacaccgtatagctcacgagtcacgcacaggttctttaacaggtgggaaaactaatatataggcttgcccgggtttcccgatagccacagaaaccttcttagataccaagtcacctttcatatcttaggtgataaaatccgcagtagtcttctaaattcgagaaccttgtgtcccaaagtaccaggaaaggagcgagcaacattgctattcatgagcaatctttccatcgtatctataagataggcacataggataccaagacccaaataggacaccgatttagggttttttcctacttggcttagaggtgggggatggtcaggggctgatctctacaataatcacatattctttgccatctcggcctcagccaaacgcggctagtgtggctacagcctctcaacctcctaggatattccctcgtataccgctgagtcatatacctttaaggcgtaaaattcagacatctgcatttggagccagacagatcatgatgataagatgttagacaaacagggggtccgtgtcagacatagccagccatggctaggcgggacatggggtgcagcaccatcgcaagaactattaattgctacgctatgccattttgggatcatcattaggctttgttgggcagtactattgagatcgatcacatatactttacaaggttggttagtagacctccctagcttttaatagccgctttccccctctccaatagagctatcgtgtcgccctccatcctatatccaactttattcaactccgctactctactctattccgacctacaacctggtgcaaagcgttcctgttgtgacaacactgccatgacggcacgacatcgtatgttaccctgctaagtagcttgagaatgcatctgactcactatatactagcgtatcgccgcctggaagtgcctgatggagtaccattcgagctgaaaccctcgccaggcaaaggatggggtgcttttgccacaagacgcattgaccgaggatctctcatccttagcgaaaagccaaccttcgttatctggaggtctcacagagaaatcacggattatcatgttaatatggcgattcaacaactgttgcctagtcagagagtacaattttcactccttcgcaacaatgggtcaagttggtttacaagtatgaacgaagctttcgctgagaactcgttcaacatcggaagttcagaccgcaatagggccgaagctcatggccttttccctcttcactcgcgcttcaaccactcttgtataccgaactcgaaaattccaacggttaatggcgaggtcatttcaagctttgcgaccagagacatagaagctggcgaggagatcaatttctgttataataccgatttcgaaggaaagactagatatgagcgtcatcaagccttacgttttacctgcgattgtttggcatgtcggcctggcactcccttccaagaacttagtgacatgcgacggcgattgatccgagggcttcaataccttacgcgtggcgtggacttggatgggcaggctgagggtttgcatcctattattgtcgactcgacattgaagtttgtcgcagagactttcagcatacctctttcctctagattgatttatactcttctgacaattttctttctcgaagaagagggattgctagatgattttatggacgcaaggttaagaccgacattaatcaaaacggcgcaattgttcaagtctgaaagcaataaatgcattgtcaggctagctatggaacagaaaacctgggtaaagaaattgcaagtggcattcacactatatggccgagaagatgctgccgattatgaagttgccctagcgctacgccgattgcgcccgttgttttaatggtttccctttctttcatatttcaaatgttgataattcattgtgctatttgataaaaaagagctttaagctcatccatgtatgtgtgtggataataaatacgagaaaagacctcgggatgcagagtaagacgaaaatccagatgttcaacgcaaagaaaatgttcaaaaaaaggactgccatttcatcctagtatgattgcagccttgccaacggttgagtttaatttggcagctcgtcaatgcgcattctgatgtattcgaaaatgctgagcaggatcatgttgttgacgccggtccggataagaatgatggacaggcccttgtacatgccggatttggcaacagcttgtgaggcctcaccaatctcactggcttttcccagcagaacactctgtgcgcgagtcttgcgcgtatccagaggataagtctatgagtcacattagtgcatgtcccaaaacagggtatcggcctgatcacatacgcagaaccagggcacggtgctgcaaatggcaccggcaatcataggtgccccgaaggggtttttgtcttggcccaactccttggctgcgagttgcttcacagtctcataaacaccaaagtagagtcctgagcccacggtgtcgcgtaacgcatgcaggcggaaaccggtgtaaaggccccaaattccatatcgtccatagatcttcttgatggcttgaacggtacccaagcgaggcttgtcacgcagagatcggtctcggactgcgtccggggcagccatggcgcggtgagacactagaactgaagtttgaacgacattcttcgccaactcgaaggggcctattttaatgtaagcgcggctcctctcactcttccatgtatcaatctaaacatacaggcaataggcgatgcgaccaagccagcgatgaggcctgcagtggtgaaagtaagaacacccgtcacggtggggaggcttccaggcttgttgtagttatccaaagggttagaaccagttacgcgttcgacgttatcagcgatgatgtccttgaaggcattgtatacggtaaagttgacgacgcggactaccgtgacacttgccaagggtggaagggcgcctatgtgatggtcagtcgatccttcagctaccgacttagataccgacttaccagcgacatatccccgaggcccttcagtgacccagagatagcggacacactgccatatgttcttgaaattgtgtctttcaaactaatcagcatattaatcccatctctaaggtcatatcgaatactcacgtctgcatccgagtcttgacgttctctagaggagtctgcccatcggagaaggattagcatcattcgcatctcatattagtcgcaaataaggattggagtgtaaaacaaaagctcgccgaatgagacactcaccaccgacaatgtagcgcaaatagtcgacacccccgatgcgacctgggttttgtacttcttgaggagtctgttgcgtgtggcctcatccatgttccaagctctgtgatcaggcatgatggcggttcttgtgtggtgagttgatgaaaatatggtacatgttcagaactgtttagttaccccgaaactttctccattggcagcgcggcgccgagaaatagctataacaatggttctccgtggaaaagcgttttagtttgcacagactctgatgctttcaggctggggaacccgatggaacgcaaagcggcctctcagaactagagtagaccgttcagcgtcccacagttgaccattaaacagctcgaccaacccagtgctatcttcagtctgttgaagagtaccccagcaggttttcacagtataaattggtgcgtttagatccgatttccagattatgagatagattcgatattagtggccggtacaatgacggccacggcaatgggtgcaaccccgcgttcacgcgttcacagatggaatcgaggtatggtgcagaattgagcggttcaagtgatgttctaagagagtcccctgtctcagccagtcgggatattcttgcgcaaggtgtatcgtctatagcaatgggttactaacagtgatcgcgagctatgagaagacgatcattagcatcaatttgctttccccatgtttctcgatggtaggacagaacggattgtgagtattcattttcaagaggacaacttacagacgatattcccctattccaccagacaaactgtgacctcaatactatgtgaagaaaagaagagggaattgctgcaaaatggcatgtggaccgagcttagctcaggcgctcaaaggggtttagggccaaacagagtgacgtcgttgtgaacagaacaggacttcttctgtgaatactggcattgtttgaacattcgcattgtttaattgactacttcgtactttgtatgtatatccatgcagagatcatgatcatattttatcttatttccagcctcggcaccgccgagggacatttaccggtcgcggtctgatcatcacttctttatatttcgtgtagagataggtagagacaagcatgatactttacgatgtatggagtacttaaagcggggagatcatcgcaggttagaccatggatcatggtaatcagtgcaatatatgtggaggacggtactccgtgacgagctcggggccccacgcagggattagggtcatgaccacccattaatcgcatcagtcgaaaccatggaattattgtaacccagattacagcctcaaatacaaacattgccgtggttgggtgatgctgcagatcattgagcaacacttcattgcctcccttgctagggctagaaggattagctggaatgtggctcatagaacgtccatatgtagtagtcaaaatatcaactgatcgattgcatgattgtcgacgcctggctcaaactgtgctaccagaatcaactagattagaattgaagagatgaattgtaatagtaaccttgtgattgtctcgtacgtcccggtctcttttcacatgagatctctactcctcgtctgaatagattcctacttatagcttaatttggaggttattatacttaaaattgtcaaccaagttccaaagagtattgaggtaatcgagtcacctcaggcaatatatagtcacaatgcaaaagtttccgttaatctgctcaaatatatatatcgactacctcggccctttctagtcgattgaatcataatattcggccacttatgcgaccttgtcatgtcattttggtagtcttcctagacgtcttctttatagaccccttctcacctttttaaagtttcctaggtagactacaattttacggaaacatttgcagtagcactgtatatccatgcagtataagcttattttacattcggccgatctccgtcatagagatgggatgataaccgggattgaatattgacctcatgtacacacatggtacgggatgcatacttgaatgttccaaggttgttagtactagccttgaattgcttaaagatggtatagaatacctctgcaatccaatgagcagagattgtaacgatatgttgtgtcactgttgccggaagaatcgaaccacagcgtcaaatgacttgtgtgtatccttcaccctaccatgggatgatcggtggcggagtactttgccggcatgaatcaggcaccaatagctgaaaatcaggcatccaaccctcttcggttcctcgggacctcggtccttccccgcaattttatgttgagctctccacatatcccgccgattcttatttatgaggcctcgcttctcgagtcgaacctataccaactccacctaaatttatctctgataaatcaacccacatatacaccatgggcaagaagcaaggaacccccgcttatgtactgggcgttggcatgaccaagttcatcaagccacgcggtaaggtcgactaccatgagctcggctatgaggctggtattaaagccatgctcgacgccaagatcaactatgacgatgttgaccagggcattgcatgctacgtctacggcgacagcacctgcggccagcgcgtcttctaccagttcggccagaccagcatccctatctacaacgtcaacaacaactgttcgaccggctcgactggcctcgccatggcccgcaatatggtttcccatggtgttgcggactgtgtgctggtcgtcggcttcgagaagatgaaccccggtagcttgcaatccatgtacaacgatcgggagaacccaacgtcactgtttgggaagatgatggccgagacgcgaggtatgacgaacgcgcccggtgccgcacagatgtttggaaacgcaggtagggaatataaggagaagtacacaacctctggagtaacaagaaaggatatcatgctaacatgcgaaaaacaggtacggtgctaagaacgaggacttcgccgagatcgcccgcatcaaccacgagcactccaagcggaacccctactcgcaattccagaccgaatataccctcgagcagatcataaacgcgcccatgatctacgagcctctgaccaagctacagtgctgcccaacctcggatggcggtgccgccgccgttattgtctcgcaggagttcctcgatgcgcgtccccacctgaaagaacatgccattctcatcgccggtcagtgtctagccaccgatgacgacacagtctacagcaagagctccattgacctgatgggcttcggcatgacgcgtcgggcgtgccgcactgccgtagccgaggccggcgtgaatgtcaaggatatcaaggtttgcgagctgcatgattgcttctcggccaatgagatgattactattgatgcgctggagctgagtgaacccggccaggcccatgagatggtccgccgtggcgatatcacgtacggcggaaagatggtcatcaacccatctggcggtctcatctccaagggtcacccgcttggtgctacgggtattgcgcagtgtgctgagctggtctggcacctgcgtggctgggccaacaatcgcctggttgacggtacttccgcggcactgcagcacaacctcggtctgggcggtgccgttgtcgtcaccgtctacaagcgtactgatggcaaggccgccacggctgtgacatcagacgtcgttggcaaaatcaacggtttgggctataacccagctgtggaggctaagggcttcactgccgagcaggccaagtccgtcgtgagcaagacgcacagctctcagtatgccctgtcagatacccaagagcgggtccttgccaggttctagaggcacagctaaacaccgttttggccaagcaatttgtacataactcaaccagactgacatgaacgatatccaatttttttttaaaatgcaccctaatctatcccatctatatgcccaaaatgttaagattttattctataaacaagtttcctaaaccgcaaaagaaatcatgaatcatgaatgcgtcttctcccaatcctcggggagcctgtagtccttcggcacagaatactgccctttacagcttcccggaccccggcacttcaaatcacacttgccatataaccgacaatagcactcagcagcactaggacaagaatcgcgattcaaccggtcaagatcaattccccgttcaccagcatggtccgcaaaaagaatgtgccaaatgtacgaaacaatccgcccggctatacggtcatcaccaggcgcagccctagactcccgatacacattccgcgaaaccccatcatcactcccatccagcagccactgcctcagcgcaatatactcactctgagcatgctgccagatgcgctcgcgggaaaccacaaactgcgcacagcactgcgcgcgaacggcatcctgccgaccaagataaagatggacagcactggtaatctcctcgacacgcgcatcagcatccccgccaaagatctggccaagcgcctccggcagtgcgagatccgatgccgagcgcgcactccacggcgacacggcgctcgacagcctcgtctcgagactgccctgcgcgggcacggaagaaggacacgtgccggcgctccagtcgcagcgcaggttgctgtacccggctttcagtgcggcgtggatgtccaggctgcgtaggagtgcggcgttgtcgtagtccgggatgtcgttgtgccaagcccagcggctgccgtgcacaaagacggcgccggcggagggtatgtccgcgtaattatcgattaggaaggttaagtaggccattgcttcatgtccgcggtttgcggggacttggagcagtttggaggttttgtctgccggcgcgtccacttggtacatgcatacatggtactgggtgcggagcggctctagccaggacgggtcgccgtccgacgagacatgggagactatcagggctggtttggttgattctgctaggccggggcaaactccgcgggcttctgggatgatggatgaggttgtttggtagcggactttggtccaggcaaagagtttgtccttggttgattgcgggcggtttaagaataggatgaaaaataagatgcagagaaagaagattagttggataagtgatctttgtacttttcggcccatgtttgtatattaattcatgcaattatatgtgtcttcatttcttttgcctccgcgttgatatttcagatatttcggatcatgcgggaatgttggtgccttaggtgtgaatatcacccctatttgcaagatctgcacgatctgcaggagaagtgccgagaggtttagatgtggatgaacatgtgttttattttggctttacccttgaccctgttatgtttggcgttcattcctgcggagtagtgtcatctgataagtggttctatatatattgtactatcggcctacagtgacaatcagatattagaaccataggagtccttgttgtctcataagtcaggacaaatatagccctctaaaagccataaatagagactagttatggtttttattgttgcctagtggtaatacactatattattttccacattatgtcttatttttctgtcttcgctcttgctttgatctcgtttcaccaatatccccttatagtaatttgctaatacctcctttctcttgaaaatgtctgataaattgctactatacagagtataaagtagcaacataatcatgccacgcccaccgcccacctctatcgttgctcgattcctatgagagacgttgtacttcctcgtgcttatgatcgtgctttgtcattcgaagtacgctttaatcttgatattggtgtgtgcgaacagggcagacagaatcatccacataaatccagagtgcgggaatattgagttgattggatttattgatctccagaacttcgagtcagaatgaatatttgaaaattctacatcttagcatgtatccatatttccgtccactccatttatagatttataccctctttctccgtagatcattcattgagtagcattgtcgggatcatccttcctagagtctttttgaaataacaacctgcaatttcccgataggaaccgcagcaacccattctcgtcgtgggggaaggattgcttcaacatcgttggacttttccagttgttgaatatgatacttttttaagatctgggagacagataggtaaagttccaaatatgcgaagctatttgttttctgggtcagcaaattgaaaataactgtatgtgcacgccaatatcagattatcacctactgattgccaatacaggtactgggacccttggaaaacgggatataataatcgttgcgcagaacagtcgagtcttcactctctttctcgagccatcgatcaggccgataatagtaaggctcagggaaagcagtctcatcatgtaggtaccagataggcgagctggaaatcatagtctgcaaattattagccaaataacaatacttttttggtaagggggcttacaccgccaggaatatgctttccagcaagcaacgatcctcccgtcggtacaattctgggtagcatggctgatgccgctccagtccatctaattccctccttcacgcaagctgtcagtcttggtatagactcgagttccgtcatatcggtggtccaattcgcagccttcaagtctgaaacaagatcattttgcaaggactggttgagggatagtgcccacagtatatgcgcgagcgtggcggaggttgtatcagtgccagggcctaacatctccttgccttctgacaaggcagactctggagaaattctttcccccgccagaaccttcagaaatgacgcctcgggtgctttttcagagtctgttgcaagtttcagctgctccattgcccactggaatactcgttaggatttcaacatgggaatatctttgagcttttggttatacgcacatcttcaaactccttgcttgaggtcgatgggccaccccagccggtaactcgagaagttacttcacaaatcctaccatacattctcattatagtgggaaggttggtgtgctgagaacttatatcagcgtgatctttagtgcaatcatggtacataccagtgacatttttgatgactttaggtcgttttctttgatgatttgtagttcttttcctcccatcaacgagtcaatggacccaatagagcttccaaacgcgaatcttgctagagacatcacgtcaaaaattcgccgtggtgatttaccggatattcacttacaaacaatgtctgcttcaagggctcgacaggtagtaaccaaatcgaaaggtccctggcttaatttttcaagcaagatattaaatctcgatatctcatctaccatcatctgcgtgagaaggggcactttgcttcgattgaagagaacacccatgtgccggcgcctttgtgcatgttcttttgggtctctatagaagcaatttagtaaccttctattcctcgtcttgataattcactcacgtaattgagaaaagagctgggtgtccatcttgaacgaactggctgtagactcgaggatccttgacaaatttactggctggcgcatgtacgcgcttgtaaatatcgagcgagtagaaagatacttcatttggacctattcgaaccaaaggaccttgaaagtcgtgagaatttgtcccaagattgaagtgttgcttttctgtcggccaaccattcttggatccccacgtttgaaagatagtaaaatcagtgttagaactagaacttaccaagccgcttgtgtagctttggtagctccaaagtcagatgtccttgatattccgtggggaattcccatagtaagcgcgatatcggcgcaagtagactggcgtttggaatatgcgacagaggagaaaagaagtacgtatggacaagctttggaaacgatcagttggttctcttaaacagcagtcttaggcctcttagcatacccatataacagctaccagagcactaagaatgccccaaatcaggaatgacatgatttctagaatctcacttcacgattttcaccgataaccaaagaagttacagatgcctttataagaaacaattatatacggtcggccctaagcaacacatcgcttgtacctgccgtattgctcgatttttcccgttgtagtggttttgcgccaggataacaccaccgcgaccgtttgtggcataatctcgcgccattcacaattttcccattgaagagccgaggtccacatttgtacagcctaaaaattctagctctattgatgtcgaatcgtgcgaaagctagtaaataatgtgattgtagtcttttcccctgacttcctacttattctactcgggcccctggtagaatcgagtcaagaaccatacacaatccactttcgcacctcgcagccatggatgatcttaagaatactgaagaatttttggcgcaggaggtgaatgccagtgatgagaatactttggtatggtatcctctatgtgcaacggagatatagcacgaattaacatctgttgtctctcataggagcgtctagggtataaacaagtgagtggaatgatataaatcttcgattcgagaactatatgctgacttgatacttcccgacataggttcttaaccgcagctattcactttttgagaatttctcaacctcgtttggtatctattgctgcgcatggcgtcttgttcttggtcactaactgtttctattagctgctctatatttcgtcggtggagttcgtgtgacattcacgacgggtatcgcagctggagggccactggcttattggtaatgatcccgaaccgattcaagcgcaataaggtggctttattaacctatatattaggacgagttatattataacctgtgtgtttacattcatcacagcagctgtgatcgcagaagcgtgttcggcatctccttctgctggttcgatttatctctgggctgcggaggcaggtggtaaaagatttgggcgactctttggcttcgttgtagcctggtggagcacaacggcttggacaacattttgtgccagtatgtctcttgcgtgtcattgttgtccatatctgaactgactgattgacgaatgataggcaatacccagtcagctgtgaactacatgctttcggtgggtatcatgttgttatatctgacagtgtcaactctgaactaatttgacttaggaattgactgttttcaatgtcgactttcccaccgatgtctcaaatatcaagtttcgcgctgtccaatggatctgcaccgaaatcctcctggctttagccgcattgatgaacctcgcatctggtatgtacactctcatagatggcctagaatgatgggctcacctcttaatcttggcctgcaatgctgattcaattgtacagcgcgagtattcaaatacgtgttttggttctcaaccggtgctgtctttctggacttcatattgaacgtcgtctggcttccaatcggtgcgcacaacaccttcggcctgcggactgctcatgaagctttcatgactacatataacggaacgggagctccagctggttggaactggtgtctttcatatctggccacagcaggtattctgatcggatttgatgcctccggtcatgttgccgaagagacgaagaatgccgccgtcaatgccgctaagggtatcttctggagtacaatcgtcagtggagttcttggcttctctgccgtgatcttattccttttcacatcggtaagtctattcaggaacttttatatagacccataaactaacaattgccagccgccaatcgatgttcttttctcatataacgcaccccaacctttcgtgcccttgtatgctgcacttctgggtgaaggcggacatgtttttatgaacgttctctctgtcgtagctttatggctagtatgttttcgattgctctttcctacaactgacaacaaatgctcgatgtaagaggacatgctaacctatctgatagaataccgccatcgccattacagcagcctcccgtcttgtcttcgccgtcgcccgtgacggagtactcccactatctggatgggtatcgcgggtttctaacgagggtcaacctaggaacgcagtccttgttgtgtggggtgtggccgcgattattacctgcactatcctgccgtccggagtggcatttacttctctggtctcagctgcgggtgttccttcagctgcggcatatgggctcattagtcttggaaggttgactttgacctcgggtgagaagattgaggctaaatggtctctcgggcgactaagcaagccgttccaactcatatcggttttgtggaacggttgggttgttgcggtactcttctcaccatatgaattcccggttgaggcctcgacgctaaattgtaggtgtcgtcttgtcgcgaaactagcagccattggaagagactttgtgctaatatatttccagatgcgccaattatcatggctattgtgactatcttcgcgctcatctcgtggttcttcactccagcgacagcgtgggtaccgcggggccggctgtcccaacctgttgcagatattgcaaattgaattgctggtttcattctcacaggtcgaaaacatgaatgtgtgtgcgatagagggtcgcaggaaagtattgcgagccattaattgttagatcggttgattccttccttcattattcgaaaccatgtttctatccatccatggatatatatcgcccacctgcactttccctgtatcttcaaacacattatgcaacatttatcaagtcacagcaaaaaagacttgagagatttgacagcccattagattcccaagttgacaaattgaaatcgcaacacagaggttgccagatcagccacgtgaccatgacataatccgcgctactggccccgtcgaataaaattttgcgatccgctttctcttttcctttcttcttcacttcaaaacatatacacggtccccaacacactcttgtcgatggaacaatctcactctatctacatatttcagtttagggacccagaccgaagaatgctcgttctaatcccgccccctgacatgcagccagaggggaacgggttcgcttttgagccaacattcccaactatgtattgatatgaaccttgcgatttagtcttgcagacttttatgcttttgcaaccggtgtttactcgcagggggggggggcgggtgggnnnnnnnnnnnnnnnnnnnnnnnnnnnnnnnnnnnnnnnnnnnnnnnnnnnnnnnnnnnnnnnnnnnnnnnnnnnnnnnnnnnnnnnnnnnnnnnnnnnnnnnnnnnnnnnnnnnnnnnnnnnnnnnnnnnnnnnnnngtgtttactcgcgggggccagctttggctggccctgaactcttgatgttgtgtttcaaccctgcgaggcatatgttcttgcaacttgcatggtcatttcctccagacagggatggccatattcgcgtctttgatttactaacacagctagatagatgtagaaagcattggcatcttcgaagtcttgtccgtcatatcttgatgtttgaggtcaaaaagatgcctacactaagccctcacagttggatacgtccttctggagactcccacttgttacgtccgctccctctatggggctgtggtgtcaaaagtaggggagatacattccttgtaaacagctataaattttgaatcttattccaaaaagcttgttactgatatcggagaaaacacaaatatgctccgtcgttgtggaatgctgtagatctgcatctcacatcagtccttgctagggactcgcagcaacccttcatcgaagacctacttcgccatccctgtgagagtatttcccctgcattttgagtagcaatagggcatgactgaagttgtcaatagaaagctcgtgaaacctgcacagcgcctcagaatctgtttgaccaaagccagcatcgaaattactgagcgctcgctcgggtatgacggtcagacttgagtatgaaattcttgcaactctgagacttgaacatggaatgcgacacgattcgtcttgaggcgtggtccgcatagccttggtcgctttttctggcttttgttcacgattcactatcatcggatatcccttgattgatcccacaccaatcattggctccaacagatatacttcatagtagatggcgttaatgcccatacaatctacaaatcatcaaatccctctctcccgaaacagccattgagtatggccggaggcctgataaaataaacaaggtaatactattgctgtttatcccagaaggagtccgaataccaggtgaagacgcgcggtagctagtcgtaacaagactcttcaccctagccccccttggccttccattccctccatgatgtggatcgaaggggctgcatataaatcccacgtaattccccagagcccagggctctgtttctctcagcatcttgtccatttgcaacaatcactcattttctactacattcatttgaagacaagtatttggacatatattcattccttctatctataacctacttaacatacatcaccattcccaatggctcgtttcagtctctccttcatctccatttttttggtccttgcggtcttcgccctctccatgcctaccaagcgtgatgagcaagctgctactcaacctttcagcctcgatggcactctcaaggaattgatggttagttagctatgtcaaagttcctatgagaagttttttattaaccaatgaactcagcatgcatctaagttgatggatggtcttgacaacaaggatagcaacgaaaaggataatgacaccgctgaatccaaggcgcagcagcagcaggccagcaaggaggaggctaaacagggggaggccaaggttgccgcgaagctggccgataaggaggcagctggtgacaagcccactgccacccctaccaagggactttcctccggcaatttcgtgaccccaactgctactcccacccacaaggcaacatctcagcctaacgccttgggcagtcttcccctcatcggtggtcttctcggtggtgctggaggcggtctctgatttaccaatgatcaagcccccatgtattaaactgaatatgagagtgctgcagactgcgatgaacgcaattctctcttggtaaacactggctggtcgatattcgcttttttcttttatgttgttttcaaggggaatggccaatgagatccttgataaatttcacgattaatttgatatgattagttcaataatttgtccgttatgtctccttcccaacctgtatttggtaaaaatgtatccttaaatgtgcttgttcaaccaaaacaccttccctctcattatcagcccatagtcgcatcatgacctctggtcgcggcttgcctgttgttgcccttcatgaagtcccgtatagtagcccgcatagtaccatgacatcatgaggtgcttcaacgactcatcttggactgcagatatatgttagttccatgaatcaccatatcccgaacgtggagcataccatttgccatgattgggtgaggcatcggcatagcaggcgtggaaaccgcaggactggcagcagccacgggttgagaaggctatatattgtcagcgagtcctttgtagaagaatacaacattaaaatggcaatatacctcgggaacaggctcagaaatctgctcgtcaacaatcgagacatcctcattctgggttttgttggcaccatcctcaacaggtttggtgctttgaatgtcactgtcatgtatagccggaacaacaccagtgtcttccgttgctctcaagacatcctcaacattttcacccttggcgtgaatgctccaataatgctgcggtcaggttagatattggtcacgtgaattggacatttggtgcctgacctggtattcttcgacagcatcgtcccaggactgaaccagggcagaatcatcccagacctctgcatgggtcaaggtcactttttttttattctttcccatgacgttgacctatttggcgttgtagtaagtaactagacatcttggcggtgactgtggttatggttgaggcggctcaccgccttccgagcaaatcagggaagaaaaaaaagtttcccgcagatgatcgggcagcgtacagtctcaattcaacacaacaaaacctcaaaatggctcccgataagagagtttcaaagcgcaagggtatgtacaatggttttggttggcgaaattctctttcctttcactaacgatactacagctgcgcctgtcgccgccgattcacccgccaaaaagaccaagaaggtcgaggctaagcctgatgagacaaccaaagaggctgctcctaagtctatcttgaagaagaatgagaagagcaccaagcctaaggcagagaaggctgctgcgccggccaagaccaatggcgagcccactcgccaggtcaagcctcgcaagcgtgctgccgacttcctcaccgacgaggagcccgaagaggcaactgcgcctgtgaaggccgacaagaaggccgagaagaagcctgcggctaagaagtccaagaaggaggaggtcgaggccgcgcccgcgcccaagaaggctgccgctaaaaagtctaagaaggaggaggctgaggccacccccgcttctaaaaagtccaagaaggaggaggtcgaggccgcgcccgcttccaagaaggctgccgctaaaaagtctaagaaggaggaggctgaggccacccccgctcccaagaaggccgccgcgaagaaggctgcccccaagcccaagaaggccgagcccgtcgttgagtccgaagaggaagatgccgaggaggatgtctcccctgctgatgagagtgaggctgagaacgagggtgatgacgaccagactgaggctctgatcaagggcttcgagagcagtggcgacgaggacgagtctgatggtgagggttacaaagagggtgaacctatccccaaggccccagataccaagaaggccgagcgcaagctggccaaggagctgcgcaagaacggcccccccgaggagcccggcactgtttacattgggtgagtttcgaccgtaattcatgatcattttgaaccatctaacatttcatttccagacgtatcccccacggtttctacgagcaccagatgaaggcctacttctcccaatttggcgaaatcaccaaactccgtctttcgcgcaaccgcctcaccggccgctccaagcactacgctttcattgaattctcctcgaccaccgttgccaagatcgtcgccgatacaatggacaactaccttatgtatggccacatcgtcaagtgcaagttcgtccccaaagaacagctgcaccctgagatttggaagggcgccaaccgtcgcttcaaggttacgccatggaaccgcatcgagaagaagcgtcttgtgaagggcaagacacgtgaccagtggtcgaagagtatcgagtccgagcagaagaagagacaggacaagcaggagaagctcaagaaggcccttggttacgagtttgatcttccccaactgaagagcgtcgacgatgtccccatccaagaggcccccaaggctgtcgaggccgctgagcccactgacactgccaccgaggagcctgccaaggccatcgaggcccctgctcccgttgaagcccctgttgaagctcccgttgaagcccccgttgaggctcctgtccctaccgatgatacctccaagaaggtcaagaagggcaagaaggagacacccaaggcggctgctacagagtcaccggctgctaagtctcctgccaccaaggcgaagggaaaggtcactaagaaggccaccaagacaaagtccaaggcgtaaaagggattatctgaaaattgtttctaatttcattcatcaagcctttttccccaaatgcattgtgtttttttcccttgatcaataaatttctttcagtattatcattcaaatcctaaatgcaacaaaagtaaaagtatggtagtcgttgatagggatgccggttgaaaggacttttctcttcgccccaggatattatctctgtctctctctaaaacggtaccttcctgtcttccgtagcagtattaaaattagcatttccccaggcgtttgtgctcgatactttactttctggatatattccttcggaacatagccctaagccgatgccactcgcgctagtctcaactaagcctagcatacatcacctgaccagtgcgagaaaaaataaaaccctctcctcgaagattccacttcttctttttcttcaactcctcgctcaaagaatcgcattcaaagctcacacacaaaaggaagcctcgctcccttttcaatctcgctttgggagaaagtccccggacaccctgcactttgggtaaaaccaaagtaccaagtcaggcaatgcggaaacgcgccgccatagaagcaattcgatagcggcttacgccctattctctcacggtatcccgtgccacccgacggttacatttcacgatgtctctggaaacaatggggtgcgtgctgggtactggaggggggaaggattggtggtcaaacaccttttcttgtattgggttgcctttcgtcatgttcggatagtcatgcgattgcctcctgtctgcttctttggaagtcgatggaggtaactcaatggggctcattcttgaggcgaggagttccttgatcttttcttttcaggagtctgtagcttatggcaaagcggtgatgagattctgtctcattgcagaagccctgtcacaggggccggactcttatatcttgccataggcttcgtttttttttgttcgcgtgatgatataccaatcatagagtcaagcacagagatcccaaggggttgttgacgataaacgatttaaaattatctgatgaacattctacatagccagcttttcagttcgaacagtttccaaaataccaatgcaattgaaatgaatgattaaaatgcagtattcataactaaatcgtagaatttcacttcgtatatataatacagccgttctacatgccacatagctaggctcttgttttttttgggggggattttttttcactgggccttgatgccctcagcaccgacaggcgcatcctccttgggttccttcttctggccagccacctgcaccagcagtgctcctacaagctcggcggcgaacgcaatgctagtcgcacagacattgctccatacctggatgctgacggatccaagcggggcgcgagggaaggacacgatccattcaacatagtaggggaaccaagcctcgggaagcgggaaaacaggcgttttcgagtaccagaattggaggaacatcttcaatccgtttgtgctgatccagcgggcgatcttgacggtccagtcgaaggaggactttttagaggtgagggtcttgtctagaaaccaaagtgttagcagtctgctcaacagatataacaacgtctcctgtagtcttgtagtagtgacacgtactcagcgcttcgtattcctccatagtcttgtcgtgtcgtcttctagccttcgcccacttcgcaaactcatcctgggagcttgtgctgttcatttcgtgtttctgctcgaggacctggcgcttcagctcctgctgcttccgtgcagtccgcgaggttgaggtcggcagttttagataaaggagccatagctgtgttgcaaagagagtaggtgttagcgtgtggaattacaatgtaggtgcgcggcggagctgggaaactatgccgaggccagagatgggtggattggagacatacaagaccatcgacggtactcgcgccgaccgtattgaccaggaaaattgcgacgtgcaagaaaaagactgtgaggacgagggacaacattgtagcggggactggcaagaccgggatgaagcgttgaatgcgacggcgcaggctaagggagcctggaagatagtgagagcggcacagtcggccgactaagtgagtgtctggtagctctgctggatgagattggaaatgtcctgacaagatagatgtggttgaaggtgtgaatgacgttgtggaaaggtggaaataacagcggactcggcctttccgccttcacagtatcacgcactacaccatcctgtctatcacgttgcctatagcatggcaagacaataaaatacagaaatattacaatcaaacaaaatatgatgaggctttgacggttgtacctttccatattcgccaaacaaccaagccctccgatgtccaacccgaaagatgcattccaggaacttgtccgcatcttctcatctagagacaaccaagtcctcgagatcgagatccttccatcaagcctaggcgttccgttcctccaagatggatgctcagtgggaataaccaagaaggtgctagtgcaggccttcacggtcgcgcgccaactcttcttcgaccgattaatgcccatgtccgaagatgaccttcaaaccacctttacgacaaacgcccagtccagaatcgcagactcggctattacagaaatcatgctcctctttgactgcgagcatctcacggcctgcaactggcgcaagcgccgactgcaggcggccatggcctaccctggtatttcaaaccagacctctgccgcagagttgttagaagcagaactcacgctcatgtcgagctaccaatgctcgccactccatcgacataccaagtcgccgaccctctggcatcaccgcctgtgggtggttgtctatctgcttcaaaaacggcattggggtcttgaggacctgtctaagctgcgaaggactgaactagatattgttctccgcgctggagagctgcatcccaagaactattatgctttcagctatatgcgacagttggatgttcttctcgctgctacagcgaatacacctgggcaatcgacatgggaaacccattctgcgcagtcagttgtcgaacgggtggttgattggtgcttggctaacccacgcgatatatcgggttggagcttcgccctctacatgctgagcaatgttccagagcaacagaatcgagccaacgctcttgagagagtggtcaagtttgcgcttaacgttggatgggaaggcgagagcctttggacgtttgtcgaccaagtatcgaggcagtttgggcttgaaagtgtgatcaaagatattattctgttgcactgcgatcaagcagccagacctcctgattgccaaatggttcaagacagtcgacagaagaagtcatggcagacctggctagcccgggcgagagtatgttgggtcgtagatcaagggcaagatacataaccggatatgatatggatgtatgtgtttacgcgtttacgattaccaccaaattgcacctccatgatatttctcatgtgtcgttgcctcgtttggttagcgctgtggtatacatgtttgggctaaatatgataaacgccaaagagattcaaatgaacgcctcgctagacacccagcccccgttttttgaaaatgggcataggcggatggttccgatcttatccataaatccagcgccgtccttcactcgtagcacactttgcgatgctgctcggtgggttgtccgtttcgggcgatcgcggaaaaggtggagggagatgagattgactgacggcttggatctaaggattcgggcgtgttattttttcccgcctgccgctgcctcggcagctctcttctcgtccgctgtagaagagaagcgatcagtaaaccagtctcatgtgggttgggcttgcgtctagcgccttcaatgatacacacccttcctctgcttctcgcgcatgatggcagcggcatcttccttggccctcgcgaattcgctaccggtctgggtattcttgttcttctgtagaaatggtcagtatgagcaaacagaagggggagataagacgaaccgaattgcccgccttcttcagggccttggcccgatcgttgtcacgttggttaccccgtgtcatgttgtgtgatggtgagattatcgcaagagtaccgagagtagtgagcgcgaaacgtttggagagtgagagaaaaaagtttggaggggtcggctggattccggcgaatcacgggggttccactcatcgttcagtataccttcacttaattgactatcgtgtttaccatcggagtaattcttactattttatgcctattggctaatttgatcagcgactatgtgatggctatgattgggctatattcttgccttgtttcgactctggctttatacttcaccctggcgcttcgcctaaaagcccctgtctaacaaccatatgctgtactcaccttggtacacgtacgatatagaattctttgaactatacccaacaggtaatcaggcttgtccgagataagcagtatatttctcctccgactcatattgtgcctcattttctcctcgtggtcactcgataagatgagacggagttccttgcctcctctccccttagcgcctagagaggcatgttactgcatatcctggaacattcgagatacagggagaacaaccgatcttttaggtacaaaagaaaacaaaacacggggaatataggggaaagaagggtgacttgtagccgccaactcgtttcagcatattcgaatatcctctactaaccaccagtcatttggctacaccgagccctagttgagatcccaatgctggaggagtaaataactagacttattctggctacaaccccgatcttgcgcctaagggtccctgtttattgcctgaatcgcaccaatgaactcctgcaggatctctcccactgcagagatggggtaaagagaaccctgccgatctctttgaccaggactctaattagatgcgcaccacttatgtggttcacgcagacgtttcaagtctattcatagaaaaaaaataccatcgcctttgttgggagtatacgtctaggctgctacacctcaatagccattcttccaggtgtttctccattgtcgcccccattcatcccgtttcctttgtctttgtgtttcattcttcttttcttgtcctcgagttgatctcgttatattgcattgttccattctttcttggaatatcaagctttctgctggacagtcgctttcttccctcttttaataccaaccttccccccaagtctgctagcagacatttctcgatacaccctcggcatcgagtatctaccattcttaacaagtgtagcaggctgtgcctcagttatgatggctcatttgcgtgaatccctggccggtccagggtacgtgatcctgaacgtcattcgcgttctcaacattatcactttcatggaccttatagctgcttgtgcagtacttctggcaaagatcgacatgctgaacagcttctttttcttcgaggccgtgacccacgccgttgtggctctggtcagccgtaagtataatcttccttttgtgttttcgtgatataaatgctaacgttggcagtcttcatgatcatctcggagctcccaatactccaaagctatttcgaccaccactggccgatgttcggacaagaatctagcttctactctctcggtgggatcatgatgatcctgggagtttcgacactgggcaacctgaacaccaaggctatgacccaggaaaacattggcctgactttctggagaatcatcatctccgccggcgtcctggcaatgatagttagcgtggtgaacgttctggcagtaagtatcgagatcaaaactcccagcgtatacccttgacccaatgctgacccatttccccaacagagctacatcttcagcgaccccgagaccggcgtcagtgcccgccaggtgcgggtcgacggcgctgttgcaccgcaaaaggcaatgagccggactagcagccaccgcacccttcacttgagcgtgaagcgcgaggaaaccctgcccacctattctcgccaaaaccccgtcaagcgtgccaccaagcgtctcaccggccgattcccactcaagatctccaagcccataagcccgacgcttgttgaggagaacgatgctgcttcctccaagtactctcgtgattctgcggagatccgtcctcccgacctcgcacaccaccctgctctgtactcgggccatatggtttgagccggttgcctggtcaactcggttgagaacggcgtttggaaggaaaggaagaaccgtgctgattgagtcagaattcctgcgttattgcgatgggcgcacccggcgctgttttattacccctggtctttcgcttcggcttgctcgtgtttaattgatttaattgagacatctttttttatgcagcattcgtaggatttgtagatattaaggatagatttgaaaggtaaatattccaaaattagaagagtatggagtagaagaagtgtaggttgagagggcaatgtctagaaaggacgggacccacgttgacgtttggccccgacttcaatgaagctacgttggacattcgaacactttaacacctttctttcttcgaatctcgactcaacttgttagagattccgatgaagtaaggtccatatcatagcaaatatggctccaatcgcaatttcctggggaacgtaagtcttgaagctcttcacatcctccgcaatctattctgaccgtgaatagcgtcaaatcagtcctcatatttttcgccccaatcatactcccacgcttaatcaccgcctatcgaagtctgcgcgtatccatcgcgagccggccaccgccgcgtcctctgcctgctgcgcccggtcgagcgctgaacatattattcggtggcatcgtcttcttcctactcctaagcctacccttcaacccacacgcgcccgaacccaacatcttctctcagactcgctctcgtctaaacacccctaccgatgtcatcttcaaccgtctcgcccgccttcggccagataacttcctcaccgaagccgacaatctcctccagtccaagttcacctctctgggtgcccgcaaggtatatctgacctatggccccgacgccttggtctcgtgccaatactgctcatttgacaacatctacacatacctcctctactacctcccattccacgtgttgttaccacacttggcgcacctgctgctcctaggtgtagccacatccgcgcccatcgcagggcgcgaggcttcccgctggcgcatcaagttcaccctagccggacttgtcctcgcagccgtcgacatctacattatggccacctacgatgcggtccaaagtgcgccacgctctgtgcgcgcgggccaaacaccgccctccggcatctacaaccatattacgctcctgcgcccgctggcctttgtaatctgcgatgtgatctgctcggttgtgctctggctctccgcgactaaccggttctttttcaagccgccctcgaccgtcgagcagattgacgaggcagtgtcgatggccgtgcaaacgctcatgggcgcaaactcgaaactccatgccgcgagtgttacccgcaatgcggtggttcgggattcgactttgaagaatcgcgacgatttgtattggcggactatggtggcttccgagaaccccactcaagggcctggagaaggtggggagcagatcctcaacaatatatgggaggaggaagaagttgctcgggctatgtcgcgggcgatggccggacatggtggaattgatttggctcaattgggggtcagtgccaatgattttgtgcgacacgttacagagggattagaatgaatatcttactctgtattcaatataatcgtacagcgtacatgtagatgtcattatcccatttctcctctcccctgccaagtgtcaataaatagaccgcaaatggtaaactgttgacaccaacatctatattcccagaattcaacaaaatcaaaatcaaaatcaaatctccaaatctcattccaatctcagctcgacaatttacgtgcatgcacttccatccaatcaacaatctcgacactcaacatttaacgaggcggtgagtggatgatcgtgaagagatgaaacgaaatcaccacgttccccctctattccctctcctacaaaaacattttcttacactcgcaagctgttgcttttcctgttcctggttgaacgagtcaagtcaagaagtaaataagggcttagatgaggcaggtcccacatctatttcagcattgatcactttggcttgattccccgttctcgactccccgactcccccgactcccggccctcttctccctcggtggaatttcgaatctcctccacactattggtgctctctccaccatggcagacacaattgtgccgtcgaaacaaatatcagagctcaagggacgcaatgcctacgtttcctctcctagtggtttacgaccggccaaggagaccacgttccgtgaatgggtggtcaccaaccagatcggtatgaagaaacaccccggtttttgaatttacatgagaatgaaggaaaagcaaagctgcacagagccgctgcgcttctaattgaatcccagcacatgcgaaatctaatacgagtaccgctaacactaattgcttctctgcaggcatctcgttgaccactctgtctatgttgctggctcttcataacctctacccttcactccgcccatatacccagccattcttccaattgtcctattacaacgaatcctcggactcctacgtccagggctgggatgatgtttacttcgtcatcagtgcggctatcgcacttaccggtatccgcgctatcgccattgaatggtgcatgcaaccattggcccgcgcctgtggtttgaagcgcaaacaatcggttcgcatcgctgagcagggttggcaagctatgtactattcgttcatctggggtgttggattggtgcgttcggcccgagatacctacccgggaatatataactaaccgctggttcgaccctacagtatctctggaagacgtcatactactggggcgatttcgccgccatgtggtcgcagtggcccgcccgtcctttgtcgggcttgatgaagtggtatcttctcgttgaactggcattcctcgtgcagcagatcttcgtgatccacgtggaagagagacggaaggaccatgtccagatgctttcccaccacattatcacctcggttctcctgagctctgcctacatctacgctatgtacaatgtgtccaatgtggtgctatgtctcatggatattgtggacttcttgttaccggttcgtcacgtactattcgccaagcgctgaacagctactaatacctccacagtttgcgaagatcctcaaatactccaagtttgaaacagcgtgcaatgttggctttggcctcttcatgggtacatggttaattacccgacacatcatctaccccatggtgtgctggtccgtttattatgatcttccccgccaacttacctatggctgctacaccggttcgacaagcgagttcatctcaacagaggcgccggattccttcgcatacatgttcggtccatacttcagtttggacaaccccatctgcttcaatcccgcgctcaagtggattttcttatcattcctgttgttccttgagggactgtctattctatggttcagcatgattgtccgtgttgcttacggtgtgatttgcggcggtaacgccgaagatacccgcagtgacgaggaagacgaagcggaagtcgaagaccagcccacatctcacgccccagcgcacttgactgccagagacggtgcccctaccgacgcactcgagaccggaaacgccccgggcttgggtcgtcggcggtccaacggcactgcctcggtgcgggcgcgcggccgtggtcgtgttcctttcgatccgagtgatcggaaggctctcttaggtcggattggatgtgaaaagcctacgtaaatgccggctttccatttatgattttcctttgaccaaaatttgatgactcccatacgagttgctccatagcatgccatgcctttgtcacataccccatgccgagatgtccatttccgggtgtcggtgctggccatgcaatggagtcccgaattacgatgaactgcgatttccaaggttagtttgcggcacatccttcagtctgcttgccgggtcttatatccactttgtttttgtttttttgatttcttattcatactcattgtcatgtcgccatttgccggctggtgtcggggggaagggggggttggggggtttcctgctgcgctttttgttgccgtgatgatctctacggacttggagtttcgctctagagatccacacaataataaccaatgaagcatttggccttgtacatgtattatagtgccctgtccggtacggacttatagatttttcctagagtgaatacggaatccagcgttgccttgaacaaccctaatccgcccatcacctagtatatagcaatctcgcctagtgaacatagtccctaagcggcggctcctcactcccactatacccaaacaacaacacattaagcaccccaaccacatccgacacagcctccatgcccaaaaagtcatccacatccaaaccaggggcaagcgactcaccacaaacagcatcaagatcaatcctctccaacttccccggcccctcatgaaccaaagcatcaacaaacaaagcatacgccaacggattaagcaacaaagacgaatgcgaatacaaaccgccagcagcacgccccgcacaagcaacctgcacctccacattcgacacgcccaccccacgcacatccgccaacgccgcagaagcccaccccccactctgcggttgcacaatggcgtcatccccagagtacacgctggtcgtcggcacaaacgccgagtccccatccccaccccgcagagcccgaataaaccgcgcatcatacccctgctgctgcacagcgggcgtacaaaacggctcagcgagcacgcacagcgtcgcaacaagcgtcccgtggaaatcactactgacagccatgaaatcgctgaccgcggcctgtgtcgacggccagtatttcagcgcccattgtacgtctacgctgccttgcgaccagcttagtaccccgatggtacgccccgagagtccggagatgtagtttatcgcgtacgcgacgtactcggcgttgctttggatgtcgcctagtgaggtgtctgggatgttgacccatactgggtctgtgtgtgggtttgcggcgaagatcttcgcgtagttgaagtaataggtgctgccggctgggtcggcggtgccggggactaagaggatggggattttgttgttcttgccgtaggaaaaagttgtcgggatgtagattgcgctgcggagggtgtcttcggggatgtcgtagggtgcgtccccgaaggattttgttgggtggattcggggactaggggtttttgtgttgttgttggctatagagtttatttcgtggtttcttatgccgtctattatgtcgaggatggttgttgggactagacctagggatactgtgtcgatggcattctggataattgtttggttgttgtgtggaattgaggcgaggaccgagaggccttctccgattgttgagacgggcttgattttgcctgttgctatatctgatatcttggcttcgagcttagatagattttggtatatttctgggctgaagggagcatgacttgtggaggtgttgaatagtctgttaaatatatctgagacatcctgggcttcttttaatatgtatgaaggcactgggctgccgagtgatgctgatatgaagagaacaaaccgaaaaagctgatagcagtgcattgtgaagcttagctcgattagggctgactatccacccgcgggggtgatccggtgaatgctgacattttatacaagagatatttcatcggagctcaatcatcatcactttcgtactatattcatggcttattagatctgagtttttatttcagcgccagatacacgtctatgtatatcggattccacacctcatatttcggggacattcaacgcaccgtcaatcttttgaacgtttgacatggaaaactctaaagtgcagaggtagtcccccataacgtccgagcaccggagtttcttctgtatctgtgtatcccgagatatataaatcagcccgtggagggtctgctgctacctccttcagaaggataagatcgacagtccacaccgacccatgactcaataggttatgaccaaaaggagcctatgttcaccgcaattgcatctcaagccgggaatcattcctaatctgttttgtgttgcaatttcacgtgtctccgccgaaaaaagtacaaaagcataacctggactaacttcagtttgaattcaaaacgaagaacactgcataaaattttgtattaacatatcaatcatccaggaccatgcacgcgactaccatagacgcgaacatgcctcctgtgggggtatataaatcccggggtctatttccaagatcccggcctcgagcttccagctgacaacttttgtcccacatgttttgtaaatcaacagcggattgcaactgagttgcaagatattcctgcaactcaggcacgggtcgtaacgagtaaggggcttcttttaaacgctgaatctcatggatggttgacgctagcatagtatatttttggaaattgatgagcccttccggtgtcatggctgggtttccgtcttcgataaatgtcaagtctttcaagaacaatcctgttgaatggttaatcatcggcaatttcaacggttcacgagagaactgaccaaggaaaggcacgcacggtgccattgcaacccgtaacgtgtcacggtaggcctggtaattgtgtgcgctgcatgtcatagcttgcaggggccttagagtattgcaactacgttcggtaaccattgcccacgtgcgggcaagccggtagatgggtgcgctttccatgcctgccaggatagagattaccgcggagtaattacggagttggtgacatgtctggaatagaacattagcatattggaataattacaagggtcaggctagagattacaacgtacattggccacattgaccaaatgccctatcacttgggtccgttttttcacatccgattctgcgagtattagggtgccgacccaattagagagctgattggaataccgaatcaaggctctgatgtttggagctagctcgggcgtattggagctgtccttcatttgccagtttttgtttagcaattcatctcgttgtactttgccgaacatatgtgcttccatgatagtcagctgccgcgcaatttccgttgcatcgattttgaggaattggagtttgtttaatttgcgtggtagaataggttttggtgggttggatattgatgatagcgatcttttgtggcactcgagacccgcaagtcggcgctgaatgactgtgagaagttgttgtacggcgcttgcctcggtggcatccgtggcgcgcttggcgaatgactgcagtattcgcaaattttgatctgtatcaatgccttttggctcagaccagaaatgttcaagccattgcttcagaacatttatcacgcgcaatcgtatcagtggctttatctgggtcgtccattctgtcgtctgggtggcgtctaatttgggaggcgagcagtcgaatcgatcgatgaggagctcaataagctctgctgcagaggtaaaatacttataagtggcgaggaagactcgattgaaggcaccgtcgagcttgtcgtggtgcgtcagattttccaccagcgctgcgagggttccggccctaacaacctccacgctgccctggtattggtagacgagtttctccggagatgtgatgtcgtgagatcccgagtccctccgctcttttgtctctgtctgatccatcgcgacgggacagccatggaaggatttaaatcaggtgtcattcgaaccgcacggtcgctgtggtcacatggcattgtgtctgaactacggtcgaggcaagaccgagcgattgataatgtttggctagtggggtactcccagcgtgctaacgaggcatccacttatagtactcggtagctctcacgttaatttctggtcctgcgaaaaaccccgaactatcatccgatctcggatacgatcagcaaccgatcatcggaattttgcttaaccgcccctgccacggaccgccgctaaccgctttgggccacgatcggagagttttgagttatctgatccgaaacttactgagaaccttggacgcgacatgtttattggtagacagaggatccgccgcgtcatttatttctctctcgtgccacgcggtcggagcccacatgtggaacttttcaaggctgaggccgtttaactgttcacgggatttatttgttcccgactactgtagcaaaaggtggtgggtatcattcagggtcgcgtaaaattattatctatactggttctaaaagaccgtgcccctgacctgccgctttttcttcagattgatatcctgcatcaagaatgtccaaggaatcgccagaactataatgccagtcccgacagaaagtagtcgaagttcggcgtaggcataggccttttggatagcaaacctggtggcagatccgactggatagctcagttgcgtgacgagatcctcgtaaatattgttcaaatttgacaattccgattccgggaggtatcgaagaagggctttcaggtatgtgttttgccagatgacggtactgatggtaagacccgcactatcgccaatagtgccaaccacgtttaacacggcgagtgctgtcgcgacatgttggtggtcgacagccgctaggatagcaagctgctcaacaaggatgaatgttgcaccaccgatagcgaggaagatttggcacatcacctggtagccaacattcacattaggctggcggaagtatatcattaagccctgtgccaacatgtagagcggaattgcaatatacaaagtccacttgtaacggccaattctccggattagccaaccagtggctagtagcagcacaccagagaccatgtcgaagatattgacgatatagttggacgtggtgatggataggttattgttgacctgcagccaggacgtgaagtagtagctccagcaatagttcgacagctgataggttgcgtccaagaggactgcaccgataatagtgcggttcgtaagaagtcgccactcgaaaagaggcactggagccaaccacctctcccaaatagcgaagaagaaaagtgtgcagaacccgacgacaagcatggcaataatgtagccggaagcccactcattgggggcgtaatgggcgaggtcgaagggaagctcaaataacacaagaccagcagtgaacaggaagactccaaagactagttactcccagttagagtttgccctctttcgtaaaggataggaatcaacaagtagagaacttacgatcaaattcgacagtccaatgctggatgctttcgaataccgtgcggccacttggtctcttgatccggtagccttctttctccgccttgtgcaggttgtacttcagcataatgtatagcggggcagctactacaggaacgacgattgcccagcagccaaagccccatttccaagaaatcttgtagtagaattcgtccgccaccttgggtcccgcaaatgccgtgataatgtatggggaggaagtgaacgcatacgcgaaagcacggtttctcagtgttgaaacgtcagctgtcataacgtctattgcgtattccataccgtagaaaccggtatagtagaagaccttgtatgcccgtcagcatccgtattcaacaccatgacattcttagaactcacgttggcggcgcagtagatctcaaaggtattgcaggtagccatgagaaccaagccgatggttaaacatataaccatcaacagaaacccttccgctcgaccccatacatccatcatttttgcgacagggaggtaggtggcagctgcaaagacatcacccagagctgtgggaaccgcggatagcgagtgtgctttgaatgaacttgtcacatagggattcagagtaacggtaatcgtagattgaaatgcattcgcgaaataaaggaaccagatgctattggggccctggtattagtgtatgcccgaacatttgtcaatggtatcggatacgcggcacaaaataatacagggaaacatacttgatgaagactgcgatcaatgtacctctcgaccaggtcatggtcacggcctcgacgtcttgaacaccatgctgcgcactcccatccggtatctcctcgagtgccacagaactggtgggactccgagtgccatctttacgatcaccgatcgtgttctgctgtgcgaaggagtcatttccattgtcttcggttgacagccggcggaacacgatacgtgctctgcggattaaagggcgaacacccataatggttgactttagaagtccaaagttgatcaggttgcactacacgtgaaacagtagggaatcattgcccttatagtaaacaagcaccgaagtcgggtttcgtatttttacggactagctggaagccaaccagtcaagtactctattcagcagggttgtggagattcaattgaatcatccccgagccctctccactggcgcttaacagaaattcaataaaaagaaaaagataagatctttcgtgctcgtgcgtgcgttcgtgggccgacccacgccacctttccctcgtcgatcggaaattgcacatcgtgcaccgagtaccgagtatccactgctgaatcctttcgatcctatcacaaatagttacatgattaatgcaaaggcaggaaaacctaaatcggggaaattcaaggcactttatgtctaagcgaggactttttcacgtaacagtttcgcccccaaccgcaatatgtacctcgcttctctagactctctgccaagagttgactaggcgtatagagccgatgaaataatgccattctatgaaggcattggctgaattgtgtgtacctgagcgtggaatatcgcatcgtttattttatttgtcctcgcctacctgccaatccttgtgcgacttccacaagtaccggctaattggctagtgtcgactatgttgctcccaaggtttagttttcaaaagggttagtcacgaggacaaatgaacattgcccaagctagtcaacaaagttatggagtcatggacctgtgtatgcgcgttcacagtcatatgtgaccatgttcagctcctagtcggattcccggatgatatcttccttttgtttgaaaggcagagaggaatatcgaaagagcactccgagggcaaggaagagcttgagaaattagctttcaacacatcccatataggaccgagttatgtcatggccgtgaactatcatacgttcttccagaatcttggagtcccgttagcctccggcggacacacagaatgggaggagtcgaaaggaacggcgaattgcaggccgaaacgcttttccacaatgacctgaaggacatcagtccatcggactgtccgtgtggtacgtcctcataaccttaacggtactattgtcgtacatttgttcatatcggaggaccgttatcggctcacatcaagtatagcgttcagtagcgggttgtagatgaggatgtcgcataataaatcttgggcgacaacaacaatatcgaaggcacttggaaatgaggtaccaacgtctcccatagtcctgcttcttgagaggccaatagctcgtcccgtttcatcgagccagcgagctgtatgtctgcaaactttcaaatctcctcagatttcaatatcggaaaggcaccaatacttggagagtatcgaaagcttaaacatggtatcgcacgtactttgaccatcgttggagatggattagattgtagtgagaataggacagggcaacagggaaagtagttgaaggaacctgtaaaagtggaaagagaaagcaaagcatcggaaatgcattaactacaaggaattcacgacctcaagtggccttcgtggtagaggcccaagtaagggaggcttggtggtggttgccgtatgtgactcgaacggttatggatagaggaaggaacgccggactccaataaatagctattatatgtacttttgagactatctgcatcaaatggaccaataatacttagtttatatggacgaatagatcctatgatcaaaagtcaagaggaacgtattggtataccatccgagaagcatctccagtcagaccacggtcaatcctggaaacccccagaaagaattgatcagggccccggttccacttcgcgatatctgcctctgtgattccaggaggaaacccatctattggccgaaaggcggaaatgggtccaatgcgcacctcctccgggataagcagtgctgttggtattctcggctccatgtccgcacgagcacaatatgagcttgcagcaagttcggaactggggattggctcttttgtggactccagtacacctaagtgaggtggatgatgggctgcgttcatttccattgcttgtgattcttctagctccatgattatttggcccacggcggcccatatgtggcactggtaaaaaccttgcactgagggtgcttgacggagtagagccagtgccgcgcgtcggatacgcggttcacggcatcgaagacttgtgaaccaaagcggaagaccgatattaatgtcaaatgtaaatggtggttgggtgccgtctgatcgcaccgaggctttaggggcaatagcagattgttcaactatatttcggaagtttggtagataagcgtcgaattgcatcaatgacgatgatgtgcaggtctcgagcatgacatgtaacatttcatgacaactcaacagaagggcactaataccaatctcttgcggcgagagaaggtctttggcccgaaggcttgtcatcaacttatcaaacgcagtatgccagttcctcagtcgggtggccagactggatagtatagtattgaattctccgggtagatgatagacatgagcctcgtgtaagtgcttggtgcatgttgcttcgaagagagggatctctacagctaatagcccgatcgcttcccgagcagatttgagtgagtcaaaccgttccgttgagaaatgctcggtgtcttgtagtaaagccgtcactggagccccacggacggcgagagcaaatgttcccaaacggatgaagaccgggataatagtatcctccaacaaggaagctttactcgtagcactagatgctatttgggaacgcaaagcggtaatgagctgcacaccttgacgataaagctgcaatgccccgtctgcgtttccctggatggcctcaatgcagatgaaaagcacacagctgatcagtccgacaaagaggtctatgctaccctgctcaatgcgctggcgaacagcagataccgagcgtgagtaccaacccaaggcatctgggttgtttttagcgagagaaataggattatcacggcgttgtagcataggtcctgagctttgttggggacactcgaatagggcactaatggtgatgatggcatcccaaacagcgggttcatagcggcaaacttgtgggacggtagtgcgccagaaatcaacatccaatccaccaccaatggaggaggcagcacattcgaaataatatgcaaatgcacgtcgctctcgccacaccgtattggtgtttgctgataatgacaatgggttgacgatgagcgaaattgtggaagaaggctgtatgccttcaaagtcacacttgcgacctgtactggtacatcgaacacagctaggcttttcttcgccgcatttgactcgtcgaattctacgacacgctcaatatcaaactctgtctatggaaaaggaagcaagcacctacttgcaagtcttgcatcctagccttgaccttggaaggactcctaggcgacgcgttgaatgatttgaaggaacagacatgttgtagcattctagattcggcttgcgccaacatatctcaacgcgcatattgatcaagtgggccgttgtcacgtgcctgatcacgagatcatggtcggcctgattcagtcgagcatttccgggaaatcgtgagaatgaggtcgggatcagatgggaatgagatgggggaaagagagctgactaggtttgtctagggcggaagtcaagcctttcgctttttggaaggagcaggacttgattgagagtcatgacagtcattgattattctgttttgttctgatatattacacctagctagggatatgggtattagtgggcttccgtgagctaggtccatgtctcggacacaggcaacttatcacgaccatgaagttgcccagcttatccaatttgtgaccactatgcacaagatatcattgcgtccttgtcccaataatctgcgggcgatggctatttgcaagaggtgtgccatagtcagtagtcggtgggcgggaatgaggtccatctctagaattcgggaacgtttgaaagtggatgtgtagtgaagacaagctaggtcggctctcaaccagtattatctctgagcctggcaagtgctgccgcgataccttcactcatctcttcacttggtttattttcagcctgaggctcagtagactgtgcagcgtgcgcagctgttgttttcctgctttccgctaaaacctcacgaagaatcgcctcctcttcatcctcttcatcgatatcctggtcgtttttgtcatccacattcacggctggcagtcgagcccgaggttttatggcaggagcagaagcccgcttcgcactctcgactctgaagtcttctcggactgcatgacaccattgttggacctttttctctccccaccccggtacagcgctaatctgctccggctgtgcatttatggcattttgtaaacttccgaaggtggagatcagactcgcggtatcggacttgttgatacttctgggtactgtgacaaactccaccagcgattctttatatgattgagcctgtttcgctcgaatggcggtgggctgtgcattctctgaggacttgtaaagctcaagataatgcgcagcctctggtgcggaccaacacaatatcaaggtcagattgttgatgatggatgttttggacaactctcggagattgtcttcatggtttggtatgtcgaccatcaccagtacgaggcggagattgtatttgcctgctaattgtttcactcgggcgtagatgtattcggggtgtaggcgatggtatttcaaggagagaaacattgcgcacgttgtggtgccaaccacataatctgcgggaatatcggcatactcccatggtacgagctttatatgggacaggatcgggttgcccttttgtcgcgcggacaccagaattgcggaagtagtaggacggttggtaagggcttggggtttcaactgttgaactttcggccttgacgattcacctggagcaggggagtccagagtcgcgggagtactagggcggttggcaagggcttgaggtttgagctgttgaactttcggtcttgaagatgcactcggagcaggggagtctaaagggcgagaggatataccactcttcgggcgtaagggatccatcgtgtgttgtttctaaaggcagagcgatcaattgagaggtgataggtcgataaagctattgcttatctggatgggacccacaccgcccaggccaatctgcctcgcttttttctgccgctaatttttttgttcttcccagaccgcagaaaaaaatcgcagtcgcaagaaagccaccatggttgaattacacaagaaacgacgtctctcggacgccgaaagcaccgaaatcaaagtcgaagccactacacccgccgccgaggccgcgtccgcacagaacaagagaactcttttcgtccgctcactacccacctcagccacgacagaaagcctcgcagaatatttctcgcaatcctacattatcaaacacgctgttgttgtctgcgacaaagagacaaaggtatctaagggattcggttttgttacattcgccgatgtcgaggatgcggagagtgctctgaaagaactcaatgggtccaagtttgacgggaaaatcattcgcgtcgactatgccgagtctcgtaagcgtgagatcgatgagaaggttggacgcagtgtccccactgctgcatcccgcgaatccaagaagcagaaggaagaagagagagggcagggtctgccacccaagctgattgttcgcaatctgccgtggagtgtcaaggagcccgaggatctgaatgtcctgttccgcagctttggaaaagtcaagtttgctactctccccaagaggaatggcaaacttgctggttttggtttcgttaccatgcgtggcaggaaaaacgccgagaaggcgctccagatgatcaacggaaaggagatcgatggacgccaacttgctgtcgattgggctgttgagaaggacgtttgggaaactaccaagaaggaagaagacgacgacgaggaggaggagctgaaggaagagaaggagtctgatgatgttgagatgaaagatgccgagggtattctggaagagccctcagacgacgaaacctcttccgacgaagatgacgaagacgaagaggacaatgacctggatgagctggacgacttggacgatgatgatgaggcagacgaggaggatgaccgaaatgccactacagtcttcattcgcaacctccccttcaccgctacagatcaggccctctacgaccacttcaaaactcagtttggcccgctacgatatgcacgtgtggtcttggattacgagaccgagcgccctcgaggcactggatttgtctgcttctggaagccggaggacgccaacacatgcgttcgtgaagccccccggggagccgaagctatggccccgaacaaggacaagcctaagtcaaacaccgctatgaagcactccgtcctccaagatgaaaactccgacccaagcggccgctacaccctagaaggccgcgtcctacaagtcgcgcgggccgtgagcaagggtcaagccgccaagctggaagaagagggagtatcacgccgtatggtccgcgacacagacaagcgccgcctatacctcctcaacgagggtacgatcccctccaactccccgctgtataagaagctctctccctccgaaatcaagatgcgcgaggacagctacaagcagcgcgagaccttcatcaagaagaaccccgctctccacctcagtctcacccgtctcgccatccgtaacctcccccgccacatcaactccaaggacctgaagcagcttgctcgagagtccgtcgtcgaattcgccaaggatgtcaaggcgggcgcacgtcaaccgctctcaaaagaggagcagcagcgatcccgcgatacaatgaaggagctagagcagctgcgcaaacaaaagaagatgggtatcgtgcgccaagccaaggtcgtcttcgagactcgcgagggtaccaaggtctccgagaagaccggtggtggtcgcagtcgtggctacggattcatcgagttcttcactcaccgtcatgcgctcatgagtttgcgctggctgaactgccactccatggcagtccctccttctgctcaagctcccgatgaccgggacaagaagaagagccttgttgttgagtttgctattgagaatgcccaggtcgttaagcgccgtaatgagctgcaagctaaatcccgcgagcccaggcccaagcgctcggatgatgccgaggacggagagagaggtcagaagaggaagcgctccgatactcgtggtggaaaaggaaaggatggaagggatgcacgaggtggccgagatggccgagatggtcgtgatgccaagcgcggcaagactggaaatggaaatgcaaagggccccaaagatgaaaaagtgacgaatgaagaggaggacaaggccgctaagcgcaaccgcattatcgggcagaagcgcatgaagcggaagtcccgcaaggggaattaaaggcgtgaatgttacatgtttacttgtttaatgtataggcattatttatcccggcattcagagggaagaactgttcttttgtacctacgcgataccaccaatttcgaaaatgaaaagcatggatttatcacactgggtatataatgtcgtacattctatccatgcaaaggcagccgcttaatggtaatgtagcccttaagtattcttggcaccttcaactttgccaacgatgttataccgcttgctgaagaaagtgtaccactcatccaagacggtcttgtccttgtccggtaggtcgtaccactcaggtacacagtcttcgggcttgagagaagatagggcaagagcacgggaggcgtccttgccagcgaagactaagaaaaagaacagtcagtttgattgttctttatagtgatgggataggtgctgtactcaccgcgatatgaacccgaggcaccataagccgaatttcggcttacatcaaagacaacacccttaatggcgaccagagtcgggcggttagggtcggaacctagtgtaagatagatattagccaatgatccttgagctgggcgcattgaaaataaggaattgccgggtgttgtgatctgtgagggataatcttctcgtaccgtcgcatttggccagttcctcgacggaaattgggtcgtccttgggcgggtccagctggactgctactttgggtgcgaaacgcttagattctccttcttgttcggtcattgtgattgttggaggtgaggtcgagggggaaaaacaatattggggtttggcggggtttgccgaggtcggtacatagccgcttcggggctgcttactgtggactacctgattgatcggttaatctatttaagctattcttattttgttgaagcctatgttggatatagggttagaggattcgatttattttctatatacggagtactctggataggctatatcgttaatctttgacatttccgtatataatgtacctcggccttttggacaatatatcctctccaggtttgacccaatcgtagaatctgcaatgataagaacgtgatcaattgcttattcgggtagattgatacctgcacatgcatataaacagaaagcttctctctttttgccctaatctggttagcacttgtgaagagtgctgatatgggaattctctcatgacgtcaaggtatacacaacatcaactgttagactgcttccttgacataactatcacttgataacacggcagagtgctgtttactattcgagataatcgttccccgacatgcatccacgttcaaacatactaccgacgtcacatgaagacccggacaacaccggaacccatagactctgctgctcagctctatcttgacgatcatgttgacttccaagttgactcgtaaaatgcccctccatagagtagaggggccatgtggagatgaaacggagggggccgtgtctgctttggctgtgatttgtccctttccggttgttctttagtttgtccaacccaaaagcgaaaacaggaaaatcctacccacctgggcttcgaaagaaaaaaaactcttcctgtccgctttctcttatcttcatttattctattcgtgcacttatttatgttgcttccctctttcctggaaatacaaagaccttcgaaatgtcacattcccctacctcggggtatggctctcatactccaatgacggccgccatacagagcgcagagcccacccgcctctctgaccccgaatcgaaacatatcaagatagagaaagagatggaagtcaccgagaaggactcatctagcgccaatggcgcggcctcggtcggtagcggatccatgtatgaccatactcaccgcaagctcaaaccccgccatgtacaattgatcggaattggaggaacaattggcacggcactatacgttcagatcgggtctggactgcgaaccagtggccctggtagtttgttcattggattcagtctttggttagtctttcccttgttatactgtcttgttgactctattgggttctcgacctgggttgtcccggctttgctactttcgacaatatcaacatggacggtaagtaggtggaaatgcgaggaacgaaaaggaaatccgtcaatggatcgaaagagaaagagagaaagagaagcaaaaaagcgaagaataaggaacaatacaacgaaacgaagcatcaagaaacaggattcgaatccctgataacacaatttcaaattccaaggatgtaggacgccgttagcccagacacttccatgcaaaacagatgtatacatgtcgaaagcgccattagccctacctctgccaatgcatctgccgaaagccagtcggacacccaagaacccaacagtcctgcctccgtcctgcgtatatcttcttatactgttatctaggagttgtgtgattttgatcatcactgtctgtacgaacaccctttgcatctttcccaccagcagcattcttcccaccgtatcccatatggcccaatgccatatgacccaatgcgccaacggttcagcctcttgccccgatcgaattgctgcaacattcttgttctctcttctagatgtagtatgacatccaaactcacatcttcttttctaggcttggctgaaatggtcacgtacttgcctatctcttcgccgttcatccgattcgccggccgctacgttgatgaagctttaggtgttgccgctggatacaacttctttatcttcgaggccgctctggtccctttcgagattgtcgccgtcagcatgattatcaaatactggaccgatgcgattcccgtcgccgccatgaatgtggttgtcattgtgctttatgggttggtcatctttctgtgatccgcgcacgcgatgccagctaatagatgggaaacagggtattaaatctctttgctgtgaaatggtacggtgaagcagagttctggctctcactaggcaaggtcttgttgagcacaggcctgatcttatacacattcatcgtcatgttgggcggcaacccgctcggcgatcgattcggcttccgctactggaacgaaccaggtgccttcaacgggtactacaagacaggcgatactggcaagttcctcggtgtcctcgcagctgtcatcacagccagtttcaccatcgccggtccggactatgtctccatggccgccggtgagaccgttaatccccgcaaggtgctgcccaaggccttcaacggtgtcttctaccgtctcacggcattcttcgttctgggtgtcctctccgttggcattctggtgccgtacaacgataagaccatggccgatgctttcgacaacggcaagcccggtgctgccgcctcaccctatgtcatctccatggatcgcctgaagatccctatccttccagacatcgtcaatgccgtcattctcactgcttcgttcagtgcgggcaacagctacatgtactgtgccagtcgcagtctgtacgggctagcgattgagggcaaagccccacgcttccttaccaagtgcaccaacaacggcgttcccatctactgtgtcggtatagtgctcgtcatcggtctcttgagtttcctgcaggtatccaacagcgcagcagtcgtgctggactggtttgtcaatctggtatgatcccctacccagtcccattttcattcccatacacctaattaatcctaactccaggtcactgcctcccaactcatcaatttctccgtcgtcactttcacgttcatccgcttcaagaaagctctcgacgcccaagggatcccccgggaaaccttgccatatcgcagctggtttcagccgtatatcgcctatttcgcttgcgcttgcacaacggtcatggctttcgtcggtggctataccgtcttcctgcccggcaactggtccatcgcgacattcttcttctcttacaccatgatcggcgtcttcccggttatctacttcgggtggaaattctttcacaagaccaagttgctcaaacctgaggaggtggatctggtcactggtgtcgctgagatcgaggattataccagagacttcgtggtcataccgccgaagtaagtacactctttcttttagttatgatttggttctgacaatgcctgtaggaatatcgtatacaagtggttccaaattatctttgaatagaactttcatgggtctcgtcgctgctttggaagattgcgatttagaacatacccaggtgacgtccgctgcgaaccattggccgtctctacttcgaactatagacagcatgtttatatgatgttagcgtcattatgatacccgatattgttataggaaatgaaagaatagacgtgattattagtcgactcgcaatgcccttataatacatctaagtaatatcaacacacaccaaacagtaagaagatgcacatcctccatagccacacacaaagccaagctaagccaagccaagctttccgtgctatatgtctttccttatacacaatcaagcttcacccgatcctccctccgcctccttagccctcaaagcctccagccgcttctgattccgcttcccaagaacgcgcagagtattgctcttctcaatctccgtcatctgctgccaattcccaatctgcgacaacgtcccgtcgacattaacaaccatcggacccaaatgatctaatttcaccgctgtcccgcctccgctcatgtcgagtttgatactcccgtcgccttgttggttcgcgatggggtttaaggggtcgctagcggggaggtagaggtgcttttcaggttgggattcttgttcttgttcttggatctcttggttttgcgtctgttggttttgcgtctgttggttttgtgttgcagggtttgaggacgcagcggctgcagagttggagttggggttcgaggttgagtcacacattgtgcgggtttggtgcgtgcagtctgatgctttgaagctcgttgtgcactgtgggaagaggatgctgtacagccgggtgtttggtgattgcgtggttggcgcgttgagggatgtccaggtagtagagcccgctgagattgtggcgcgtacgaatgggttgacggatagatggaggagagcagcgcggtagactgtgcgcgatacttgcatggttcgggttttggaggtttgatgggctggtgggagggaaataaggattgcggagttggctccggtttctagattattcgagctcgtcgtggattgttacaccgcattcttcaacttgcgcttgtgttagatatgagtttgcatgattaattattacgcaaatagttctatcttgggtatgcatatatattatcttcaattttgtctgtgacatgagattacagagttgagaagaggtgggtgtcaatgggtgcttattttaccatatcgggagtctcaaaacttgcccagtccacctcaaatactccagatctatattctatggttaccaagcatcggagtcctgcgtggacttaccgcatgatacgggtgtaaatatgaaactatcgaaaccaccagttgacctgcaagtatatcagcaacatacacaaagtctactagaagaaacatactcaccgaagccgtaacaccttcaccaacacccttaatactatgccaccaccccttgggaatgaacaacccatcaccagccccaagagacgcttcaaagccaaccccagcatccgaaccagcggacaccggagtcccccaaaccatctcatctaacaacgctctttccctcccctgcatcatctcgtcgccgcggaaagccgctgcctcccgactcccactcttccccagctgcctcctcacagccccgaacacagcctgtccatccgctggcgcaagcagccgcacaaccttctccccagccagctggacaaacaagttcgggttcgggtcgcggtgaagcggcgtgtaagtaggcgggtgtccaatccacacattcgtatcgtatacatcgccctttcccgcacacgccacaagctccggcgtgggaaaatcttctctgaggataggagggaggtcaaggagctggcattgtgctaggtaaagccgcgttgattggggagttgtctcggccgtgcgcatccagtcgaggaacagcgtgagcggcgcgtggaattgccgaaagctatggatttctgccgtttcaccgttggatttggatatagcgtcagccggtgtggattccgtgagctcgagtgggacgaacgcgtcggcgccgtgttggcggagatattccacattcaggcttgcgccggggttcgaggtgtccggtgttgactccagactctcgcgtttgaaccactgtttcagggcggggaggtcttggaaggtagagcgcgggaggattgctggttgttcggggaggaagcatcgctgctggaaggtctccagggtggcatcttcgaggatgttgacaggtctgtattgagggtttgaagaagcggagaagtttcggacgcttgaccggggtttattatgaagggatgagcaactgagtcgcatccagactcggattgaccatgcctggagcttcatccagatcgacgtaggaagggcgagacaatgaagatcggacaacgacctcgggagatgaacgggtggatctccgagataacggtcttcttatcggtctaccacgtgactccatatgctgtttctggaccgccgacacaagtcacccaacacaagctgcagggaagcttgacttgcaggtgaaaaactgaaaactccatgtgtcaataagtataggctatatttagtcgtcaatacctaagataacttccgacgaatgcttacctcaagcgtgcatctatcggagggatctatccgtggactagaactatatatttcttcaccagcgacggtgactatactgttgtcgcattctccgctactaacaacacccctttcacccaaaaatggatcatttatagacagctctcggggcataatcattgtatcacagaccatgatgtagaggaaggacttggtcctccttcgctgcgggcaaattcgcttgtcacacaacttctccccctccctcaagatattcagagaaacgatagcctcttcccaggggattacgtggattatctgtgtgggctacaatgcccgggaagcgttctggccgctgcatcaaaacctacgggataaaatccgtgaagtacttctacagcttcgtgttctacacgcctaaattcatatagaacttggctatcacaggtctatggtcaccctttcgcataggaaagatcgtttacgatcttgattcgcaggctatgtatgtctatggcctggactaccgatttagggacagaagctgaccccatttcactcggcatatatgtggtttctggcagcgaatcaaacatggacggcactgtttacaacttgtttccgcagtacaaagctgggccgagaattgggctagctggagctggtaaatcaatatactatgatggtgcagttaatctattatcttgaccccgctccagactcctttctcagaccgaatttgcacaataggtccttggctggtatcgagtacgaaccctactacaaccaacacaagctgtaaaaaggcatcaagcgatttttcctgagtataatttgcccttcaacccattctaaaaaggatcaatcatgagccatacagggagtattgccgtcaatcacaaagaaggtgcatgaagccgacgaagaccgaggttaaaatggatccatgcagttttgtacatacccttgcacgtctgaaaaaaggccggccatgtgactgtacttccctagccaagaaagaccataacatttaaagctcactcttgccctcccaggtttacggtcgttgaattgcctacaattactattaacttgcaacatgccttcttccatcacccaaattcataagcgccatgcatacggcaaggatgctcacacttattatccggtcctcatagtaggtgctggagagtcgggagtggctatgggttgccggctcaaagaggtcctgggaacagaccagttccgaattttcgagcgtcagtcaggtattggaggtacctggtggatcaataggtatccgggaattgcttgcgacgtgtaggtgatagtgttctaatgtctaaaagctcaataactaacctagaaggtaaagaccagcgacattctactctttctcctttgctctgaaaaaggactggtccacacttcatcctcccggtccagaaatagcacagtatttggcagatgtctgcgagagatatcaaattgtggacaagattcagttgaataccgatgtcaaggaacttcgatggatcggggatgacgaggaatgggaggttacgctctcgcacctcgtccctggaaccggcgatttgactcaacacgaacgagatcgaatcgcggcccaggatggccatcagaagatctacgttaatacagaaattgtgcgagccaaggtggtcgtgagtggtgttggcgggctggtagaaccgaacacatggccgaaggacatcccaggtattgaacacttcgaaggtgacatcatgcatacggcccgctggaacaaccagatcgatttgaaagacaagaatgtcatcatgattggttccggctgcagcgccgcgcaggtagtgcccgagctggccaagccagaggccaatgttcgatccattacccaactcatgcgaacgcctccgtgggtcgagcctgatacaatttctcctgaatatctccctgtgtacgaaaaatggtcgcctagactggtgactaacttgcctggactggcgttattcatgcgatgtgttgttttcctcattatggaaaaaaacttccaggatatgttcacggacactgcatggagccgaagagcgcggccgcagttagagaagaagtttttggaccacatgcgtcaaattgcgccggagaaatactacgagattctgacaccaaactacagcctcggctgtaagagacgggtcatcggcggcacttggtatcgcagtctcaatgctccaaacgtggagctaactactcagcctttgacaagggttaatgcaaagagtgtgactcttggtacaggccgccactatccaccgcacaagtctgaagatgcagttgaggttagagagattcccgccgatgtgatcatcatggccaacgggtttgaaaccaaccaatggctgcacccactgaaggtgattggcagggagggcaaagatctggaagaggtttgggcggagcgtggaggtgcccaggcataccagggtatcgcaatggattctttcccaaacttctttattattttcggcccgaataccgcaacgggccataccagtgttatctttgcaacggagaatgcggtaaactactcgttgaactttatcaagccgatcttagatggtcaggtcagctcgtatgaagtcaaggaggatgccgagcgtgaatggactcagcaggtgcaggatgcgcttcagaagagtgtgttccgtcgtggggcttgctctagctggtacatcactgccgatggttggaactcaaccacatatccgtacgttccttgcttaatgcttcctagttgttactgacatagtatccagattcactcaggttcactattggttgcgttgcaaattccccgtgtggcggcattggaccgcgaaactcacgagaaagggacggattttgcgaggtgttcgaatgactctccatggtgccctcatctttgggcttattacaaccattggcttcttgagaaagaaccctcagcagaaggctcagttggagcagtcattgctggccggaaaggagtggctggcctcggcggtttcgcaattgaagcgatgatatcttttccttgtgtctttcgaaattggagcactatcttcagagccaaaaatatacgcaataacaatattatgatgtgcatcagtatacaaatctcttatattctccaaacgctaggaccaatgactgaccggataatcagatgagtaagctgaatctggggaaaccccgcgggagaggaatttctccgcactttaactcgatagctctcaccggctactcattgagtcgcttcatattctgcaggccatggcttcagagtcaccccagatagaaatgtcaccgccacagtcggatccccgcgatcattccgtcggtgcgtctgattccaacaagagaaaggcggaacaaggaaacggaacgcaggcgcgcacgaagcggaatcgctacatctccattgcatggtatgatatggcctgatataacctgatccggcacattttcctttccgtacctcggtcgctttaccttgcaccattggatagcctgttctgcattcaaagccatacgattctgcctacaccttcggtacttttgtcggcggatccgagctaatcgtggagttttcagtaatgaatgtaagcggcgcaaaatcaagtgcaatggccagatgccttgtcaacggtgtggccacctgaatttagaatgtaagtgggctcatagctcgtccgagctatccgatcaacggtctcatacgctgactcactcgccaggtcgctatgcgcctaattgttgtaataacaatttcaaagattcggagtaagtcgaggagtaaaacccgtccagcatttgatactaataaccgggctagtgaattccggtcaatcacagatcagatcactactctacaagaccaagtcaatagcttgttcagcaaccttaatgaacttcgtacccaaagaccagcctttgaatcaccagattttgagcatctctctcgaaatggatctcaatcagtctatactccaatacaagctgggctagaaaagtcccgagcccggcccccacgctttcatggtccaacaagctcggccttcaactttgacgtggccaaatccagtttgcagaatatgggtatcaccccagcggaagatgggatcccagatggcttgaccaccgcacatgtatctccaacagggtcaccacctcccaatctgggacaacttcttccaaccacacaccctaccaaggatccaatatggacaatcccgcgtgaagatgcaatgcgtctttgtaaggtttacgaggaagagattgggatcatgtatcctgtggtggatatcgccaaggttaccagccaggctaatctgctctacacattcatagaggctgccacccggacaggctttgcacaaagagggtttccgggttctgacggtcttcacgacgaaagctcgattattcttaaattgattctcgcaaccacgctggtcgtggaggggggcggtcagagtgaacttgggcaccgactctacttggatgttaagccatttatagaatcgaagttgtgggagcctcataccatcaaaactatccagctctttgctattgtggtaagccaaagttttttcaaagccgcagtcaataaccctaactttttttcccactctaggctacataccattaccatacggacgatgatgccatggcttatcggcttattgggttggcagcacggatgtgtttagagatgggattgcatcgtcggaatgctttggtgaagtcattcccagatgaggtgcagtgggacgagatcactcggctgttctggtcagtctacagcttggacagacgatggagtttaggaacggggttgcctttcgtgattcaggacgaggatattgatccgaacttaccagaacctgtaaggctgcaatctcttgccacgtatttacctttattaaccaagatgtgaaaattacaggatgcatcgttgccttacttgcgctgcatggtcctatacaaccggatcagctccaagatctggtactctggtttaggctccgaaggcaccaccgacatccgtcgtgatgagatcggctatctggattaccaaatcctgcagtggtacaagcaggttccagaagagctcaagttctatcctgtcgactcccccaaaaacggcgaaaacgtaagcagaggtatgaagagactcagggttctcttatacctgcggatgaaccagctgcgcatcctgatatatcgccctgtgctccattcttctgccagcattgccgaagatcgaggccacgcacagactgttgtggaagtagccaaagactccatccgtgtcttaactcggctgaaccagttgtccgatatctaccggacacagcaaataacattcaactatttcttggttgctgccttggcggttctgttcctagcagtgtcccacgccccggtcgacttcaaccgacaggtccgcgatgaattctatatggctctagacctggtcaacgggtttagtaccaagtcctacgtctccaagcggttatggaagacaattaaaggtctacgaaagatcggcgagaaacttggtgttctcgcccgtccttttggaacggactcaaatgatcctcattcaagcgctgcggtcgccatggccgggctcgcgggacatccaatccaggacctgtctatgtacgggcctctgaatggtgggaatgaacttggaagtagtcctctcaatggactccagatgagtcaagagttgacaaacctatttgaggctgttggcgcatttggtaatttcatatctaacacttcaagtgacggtattaatggattcgttgggccggatggggaaattcagaacactggcgagggtttatctggggttttgggtgatgagggagagtttgcccgagtcattcgagacttattttgatattccagtatatacccttttatatttacctaggtagtaacatagtatcacaggccagttggaaggttagctaattgagtcgatatgaatatcttgcgtacatgtctgcagacattgatggcctgcttctcttcccacgtcagctgacacgtgactcctgccactcaggcaaatcgaaacctgccagcattgacttcgctttagccatcgtgggagacaacagatacacaatagctgtcccaaaacgtgaacgcccaagcctttctctccaactacccaccgcccccacgaaccgaacggacctaacccgattcgatcgacacacccaacctccaggctcgatcaccaatattaacctccgagcgtctttgagctctggtaagtgatccgacggctttcgatatgaaggccacaagaaactgataagattctagtggggccttagatccaacctcttcccgtcgatcgcacaatctcccctctcccgcacattgccatgaacatctagcttttggcccctccatcaacttcaagatctcctccaattacacttgaagtctttcattctgacccccaaaccctgtaccccttttcgccacgagccagcctctccgtgtgacgaaatcgcttcgtcttcgccaacatcgccgaagacctcaccccccagctcggcaacgtgtcgagagagacaggttcggcgttggccgacggcctcgacaggctggatttgagtcaactgtctgaatcgaccctttcgtcatctgtgtccgcctcattcgacatgtcgtcctcggaaggcgcgccggagtcctggatttcctcgttttgttcgttgatgggccatgagtttttcgcagaggtgtcggaggacttcatcgaggatgatttcaatctgactggtctccagtcgcaggtgccgatgtacaaggaggcactagagatgattctcgatgtggagccggaggatgacgaggaagaggaggaggaagaggaggaggaagatgaagacgatgcgctcggcggcgaacctgcatacagaagagccggcgatcggcgacacgcccgagtcgcaagcgatttgagcgtgatcgagagctctgctgagctcctgtatgggttgattcaccaacggtatatcacctcgcggcctggcattcaacaaatgctcgaaaaatacgagatgcagcattttggcacctgtccgcgagtcaactgcaacggatgcaaagttctccccgtaggccgatccgacacccctggccacgaaacggtcaagctcttctgtcccggttgcatggatatttatacaccccccaacagccgtttccactccgtcgacggcgcattcttcggtacaacgttcggatgtctctttttcatgacattcccagatctggatatcgggccccgtctggatgcagcactgtcatccatctcgccacggaatgcagcaacgcagtctcgcactggctctctgacacgcactccggcaggtcgccaggcacggtcgcccacaccagagaatcagccgctagaaatcaacggcgtccggacacccaacctctgcccgggactcggcaagggcaagatctatgaccccaagatctacggcttcaaggtctctgaggtctcgcgtgtcggcccgcgcatgaaatggctgcgcatgaagcccaaaaatgttgtcgagctcgacgaagcgtggaatcacgagcatgggatgtctccgcaggaggcacgcgacgataaggagggcgacaccgagatgaaccctgaacaatcgcaagatgctgccattgcgaaccgcaagaaggccccgatgcgacgccggcgaccgaaccttggcgccctagtccccacagatcctatggacgtgcacggtcgatgaggggataaaaagcttgcattcgtggttgtttcaagattaagtcaccgtgtcaggggaatatctgtgccatgcccttgacgggacgattggttcagagttgatgacgatgatgacagatgtttgagcttggtctactcgctgctttgaatgggattctcttttcttctaatctattgggcttttattctgtctgcgcgcatcttcctggccactttccgcgatcctgtttcgagtacaaggatcaacttgtccccattcattgttttattcttttgttcgtccgtagactcagcacattacttttttgaatggaacatgatagtagtaaacattgcttgccaactatctttttacctacatgcttcacacttttatgactcgatgggtacagagtcaccagggcccacctccacgtcagaagacaaatcatcataagagcaacagagcctcaagtaccacaataccctaaggatctgcaaggaaaagctgagcctccaccaactttgaggctccaactgcatgtgaacgtcgcccaacaggctcgtgtacaccggcgtccccgacgtaacccaacgcatggggaatttcaaactcaaacattccaaatcatgcagcaagtccctaagtctactcagtcatacgctagcgtttgacgttagcacatcggcgacgccgacgtcaaggatgcacgatgcccgtgccacctatgacaacagtctcgtattgattaggccgtgccttagttaacttacttcacactctgaatctgatttgtaaggatacaaagtacataatttataatccactcaaccggtaactacctagacccctgcacaaagaaaacacaccaagtctatatagtgcgccggactggcggactggcggaacggcggatgagcggtccacctggaaatcccattggggatttagcgtatatgtatatatgcatggccacacgcaaccctagtcaattattggggttgggcgcgtagacaacttcttcgacttggtttgtcctattggagtcgtgagattgtggtgtaacgctgggactgggactgtcacatggggtatacctcataaccatggctaagattctttgttggtgacgcgttgcgattctcaggtattggacgatgctgttgacggtgctgttatggtgggtcttggctggtgagtgcattgtttgtgctggcttattggttttggtatgttggttctggttgccttgaatgagggggttttgtattgccacgctcctctcttattctatttcttttttaataatagctagggatattggaccacatcaatatctcagtggtctaaagttggtaacgttgctatattggttttccaacaatgtagtatatctttcttcggctaatacttttgacgatttggtcctttcaaatttacttttgtaagaacatgagttaatatacagatctatgaatgaatggtgagatctttaattaaataaccttgcataatcttatatcttggcactggacacagtcagcctggaaatgagttgatcatcttaaaattaggtcttacccatagtcctggtgtggatcaaggcccattgaagcgagtacaatggtcccccctactcaattgggtatcatgacagcactatcccaacaacataaagcctcgtattactcggacttcggagaaggaaatagagaggaaggggacatctacggctctctcaaccaagccctattgacagaaaaggggttttagctcctaaattacatttcaatgttcgaagtaatatcattgcccgttttaggaaagactgtgtgcggtggctgtagcctcaacccactctataaacccactcgggggacattggagccacaatttagaatcaagtaagaaactggagaaagtaagagccaaaccttagttagaagccttcgattactctattgggagcttatcaaggcttgtttttgcccacctaccacgtcagcaacattaacgagcgcacgttctctctttgcccttcgggaagaacccgagactaaatgctgactgctccaataaatagtctatctcagagacccataattggaggctcatatggcacatggtcgagaatctagtactccgtactgcattcctaattagtgccacgcacagcaacacccgcgtggaaattacaaatcacaacatactctagaccagcagctcaaaacccaaagtcgatccaagaagatctcgaccagctcgaccagctcgaccgagtattgcccatgcatgtcgacccaaaaatagtcgtactccgtaccaagacgccaagcactccatgtatatatgcgtcgcaaatcgccttcctcatctgtcaaggctcaaataacgaagaactcccgacatagcaaccgaaagacctacagaccacggttcccaatactgcggtctcccgcgctgactgcggccagccccgctgcagaatgtggagtttgacggcgcatatcccttaaggcgccctacgggtctgggcagcgataggccgatcttagctggttctgattcttgacattaggatcatcatcatgtcaacggcatttgtccacgggtgttcagcttgctagctcacatatgtagtgggtaattcgaggaactttattccgctgtactttttttttttccgttgcatattcccgttgatttgcgctgttttgtctagcctcggactggggttgccttgtaatggtatgtttgatgcgagggatagatatcctccgccctgtacggagtatacggagtatacggagtaagtcttactagcacggaagctcgaaccacagctgggggatcctatctctttctctctttattcggattcccagcctcggcaataccggccgagttgacatttttggctttcgccgtagataaggttggggacaaatgcgggtgaatcactgcaacatgcgacgtgcgacgtgcagagaggaggatcggtcaaaaatccgctattatacaaacataaaacaccttcctctttggccaatgctgaagccctctggtccgcatctccatttttttttggatcgacaccggtcagggatgggggataggcgggaacgctgcagcccagagccgccaaccctgataagaggaagcccccaggctaagccaaggctaagctgggataggaaaatgaacgctattggttaggccgcatactttcatgcatttagccctttagcacctcgcctctaaactcccgccatgtgggttgagcgggaaggaaaaccacctaaattatagcgttcagcccccaactctccagtaaacgagtacggaagcacagagtaccctaggagactaattcaggccgacagatggaggggccgtgtttttttcgcatcgtcgtatgatcgcagcttttctttgcggcagtgattgcatacagcaacccccgtgccattggtcttggatagcaatcgttggagtcagaaggcttcctcggaaacagacctttgggacccggatgcggatgtacactgtacccggggcgaaacatcaccaatccaaagtggatgtgacggttggaaattaaaacgacagcgtatattgtactagtagtaggcgtgttttacttggctccagtttttcggttggctttcttagggtgtttcttagcttcgaggatcgaagggggtccttggttaacgtgctgtcctaaccaaagtactccgtccgtacaaatgcttgaaaggaggggggggggaagagttgaggcggagcaaagtctcggaccacgtccgtggaccgtaggcatatagggaaacaggggtggatttatggggcggaggataatgcagattgcatcatccgacggatttattggaattccagtccgtttgaaatgtcggagtggctgttttagtccaactggcccaatatcccgggataaagaagtgctactccgtatgtggggtattgtctctttctgcagcgatcgggcttttcccagcagcctggtccttagttgacggttggactttgctgactccgtagttcgagatgtttcttgagtcatgtacttgtgaacttgtccgctttaagatatcggtcggtggtttgtcatctataactgtccacgggtcactagttagggttaccaaactggggacgtcattgacgaatagacggtccctcaatcaccctcgagaccttcagaacagaaaagggatagtctcggccgtacagaatgtctctcgctaggctgaaattgaaaatcccgcacggaggtttgggggccgtggagttaatgcaagttatgctggctttggaccaatcgctgggagaacttccaaggttatatgattctattgtgcagtgatcaaattcgtctgtactctgtagatctggattaatcagaaagcaggaaaacaaagcatcgaaagaaaaagaaagaaaagaatccattcaacgtggctccctggctcacccctgttcccttgacaccacgctaccaatagaaagaaaagaaatcaacgccagttatcatgcagctatctcatcacacatacaacgtaataggggtaaaaagggctaaaacaaaacagaaaacaaaaataaaaataaaataaaagagtggggaggcaaaaacgtgtcgggtggattcgagtccggtgttcggggtcaatagggcctggatggggcggagatacccgcacttcgggctttgctgcccccgatcgccccgatcgccttacggccgtagatcgtactcatacaggccatgcatggagcgcggcgagcaggggcctgattccggtgtgagcgggaatgtgaaaatagatgtctccggtgacgtcgacggtgctcgttggtcgtagtatgcaagcgctggcatctggaaacgcaagcaagatattagctgacgggtcggcaattcggagtagattcagcgaagaaattgtaccgggagcgccgaagactggtgttgagaatgggcctgcgcttgggcttgctgttggcacaggtcgatcccggccatggttgcgtagctcatgctgaacggactgatcaggtcgtcgtcgtaggccagtttgcgggcttgcatcgagggcagcatcggcaccagcgaggggagctgctcgccatattcggcctggtaggcgatttcgctgtaggtgctcggcgccgcgtggtagatcggaggctgggcgtaggacggccggtaggtgtcatacgatgccatagatgggtaggagaagaccggtgggggtgaggccgaaagctggcgagtgcactgctgggcgaacatggtttggcggtcctcgggggaatagtagtcgtacgaggcagctcggtctgattgcgagtggggcttgacatctgtgactttggagcgcggctttgttcgagtctttggcgacggaggagagaccggctctgcgtgggattgctcgggcgaagcagaagttgcagctcgtctctcgagatcctccaagcggcgcttcagtttcttgcctgttgggttgcgccgggtcaggaatgtacactcggaacggtctttctctttttcacttacgatagttgcgttgcgcaatacggttttggatgcgccgacgctctgcgagatccgagatcttggtccagtcctcgtttgggttggcgttaggactgaatgcgctgctgttgaggtgactaccacgagagcctgaacggccatcgtacgatggagagcgattcatagtcaagaggcgaaggccaagagcgatcaaggtagagtacagaatagagtagacagagagggaatagtatagtagaagtagaagcagaagtggaagtgaaagatgaaagtggagggatgtgataacggggctatgaggctaaagatccgtggccaagtggatgtcagtatatttatatataagacgtcgaggactcaaggccattgatcagctggaattggtttttcgggccttgcagctaagccccgtcgcgataaccaggtcagtccgtgctcgaatgccattagactcgacttgccatgtgcacaaaagtcccgggcttatttcgtttttttattttattttttattttgcccagggatccacgttcagcctctggtaatactgatggatactgtcatgaaacgtctaactagatatgtacaatggtcagtctactggaacggatccgcgaaacccttaatatctaatataccaatcactagccaagctgggaccactaaactcctaactcctactactaacaccgacaggccggtctctgatcggtggatctcagatctaatacgtagcaccaaagtggtacggcgtatgatcccaatccaagacggtaggatggattattggagttgggccgggactcgctaggcgttcgctcgagggcgatccttatttgacctgactggcccgagacacgatatgcccagggatgaaacgggatgcgtggactttggggttacaccttttgcctttactttcttctcctatattctcacgtgggttgcttcaatgtgcacggtcgtgaccacgtttttgtttggtcttcatcttggcaacggactaggggataaagatctgacttggttgatcaggatcaggattctggcactattggaataggagaagggattttcgggactatagacgaaaacaactcctgggaagtctaggcgccctggagtcgggaagtcgggcctgtatcgcctacggatgctgaacaattgggtcgtatacttggattcaccctgacgcatgcactggacgagccaccgtccttcgtgactctagaattaatgacactttgcttttcttggctctttttcctgctttattcgtttttttcttttcgatttttcttttctttttttctgaattattcacgcatttccactggttgcctgattggcatcgacaatcccaatcaaggcatacgctgcgcagaaataagggctggccgtattcctttttcgtacattgtagttgggagttaatgtttgcttactgtctagtctaatctacagccccggagatacgcctagacccagattcttgacaaatacgaaatacatcgttcaaagcccggaaatcgggggccggaagggaaatccgaaaaaagaggctcttctcaggtaagacagctatgctatgaataggtagccttgcagggtctctccgccaactcgggtcggagttaatagcaggaatgcagtgcgtattggtccaactccgctagtgcgtgcccgaaagtcgtcttatcctccctgtatagggctgagttggacaccttcttattcctgattgagtaatgtcggagacgcatcccatgaccccagtgacacgctcaacgagcacggcagctcaggtacccggtacatagttctcttgaccgctaatgctgttcacgcctccagttggaattccaagcattgcacagccatcctggcggaaacgcttcctcctgcagggattgtagccactcacataccatgttcgtccccggatgctgggatcggttgcatttcgagccttctagtaacaatctagaagaatgttcctggcggtgggctatcatgcagcccccgaccttgctgtgtccgagatgcaccccccatgacacatgcgtcgctgcagaatgcctcgtcttttcccccgttgtgctttacttgtttttgcaatatttcctttttttgaggagcttggtgtcactcgaggattatcaatgacggcaagctccgagcctcttgcgtcgtgctggcacgttgtcgttctcgcttggggttgttacactaaacgtgaaatggaccgatgtgcgaaagtccattcaagcgagttcactgggtgtgccaacttcattccagttcgcttcaaatagatttgcccaggtcggagacgtcggacaaggcgtccagtgctgaagctggcgaacaacacaatctccgatgcgagttcatggcaactgcaaaacgaacatggtcaacatccagtttgttgctctcttccaaggttatctcaagtcacaccaacaactcggcacttaacttcttcaagtttgcgttttactatatttgtcatgtataggtcaacaataagtccgggagagaataattatagactctcgtcgggggtatcccaagataagaagctgaccacctgttcccctccaagccacccaattccagttattccccgatgcaatagaatccataagagccttaatcgcaaccccccgaatatgccgaacactaaatttagcctatgagatccaacaacccccattgttctccatgcggaacatcctgaaacgtctgtcgtaccccgctgtggttctaacttttgaatctgtagccgaaaggcgtacagcctgggcctgaaaccctctcaagtgcagagaaagccgagccggttgttctttttttgccgttcctctcgcttcatttgtcgcctctgggtttagcctcattccacgtgggccacgttgctgcatgtcgcctattttaccttgttttcggtcaacgtgcagctggatatctgccgttggtctaggctgtattcctgcgatatgatccattcatccgggctatcaattggatggctccataacccttgtgattagattggcatccacggccctgtctcagggtttgtctgaagtcaatgtggaattataagacgaaacaggcggggttacgggttcgggtggctgacagtcgtcagcactatgtttgtgcaaggtcaagctaaacgatctacatatctgaaactccatgtgcttgggatagtattatgctcgtaggtatctcagcattttctctgcaagcgagttaattcgactcgggtttgagttattggctttgaaacgatctcaggcaggtatttctctacataaccgtgtagaaggcgacagcaaaaagtaccatttctacttcaactgcatctgcatctgtcaacaaagtctgcgttggctcttcttcctgacatatttcacgaccaattattttctttctccatcttggtaaatctgtcatggttcgtggcgttatgtgaacaagttccgctatataattttcattgcccgggtgaagatatatattttggcatcgccagcttgtaaactcattgaacattatgcaatcctagcatactctataatgcctatactgtgattatatgtatcaaattctttaccttccccttcctagaggtcctcatgataacatataacagcactccatcaatgcctcgaatggagttgttcttactgttgtgtaaatatgtgttttcccgtatcttctcgtttcaagacgtcgtttgcaccttcctgcattatcccatgagcatctacccgtggacataattggaaaggtaaagaatcacctattgacgcctgaatccgtatagtctggatcataatctctgcaccttataaacgcctcttcttctgttccctctcctcctcctcttttccatcttaatggttcttatttatacacttctatatcctgccctttctccacctatcacattcctggcaaggcatttgcaatgagatcttatcaccttgaatcctcccgcatgctctttggccgtatgttgatcaaaatatcgataagtgcagcttggttcttcttccaaggggtatggatcaaggacccgtatcccttattagaggagaagggatgcacttagcgatattctgataaacataatgccaaaaaacatacagaacagattcatggaaataagtctttgggagtataggaggccactataaaccaccagatggttctggttcatcgttgccgattgttactccaatctttattctcaatcaacgtccaaggagtatctcaatggagttgaactgacttggtaagaccttcgtagtttgtattttctccccccagaaacggtaatatgccaatcatacagcacgtgttactcgaagtgtacactatacatctacgaagttgtaacttaacgaaaaaccgaggataccaaagttcggaaaagctctctttataaagaaccaagctccagatgaatatgtaaaagacgcccgccgctgctcggtagcctcggtacctcaaatatccaaacaacatgcaaaatgcaaaatgcaaaattaaccaagtatcccttgagcaacgacttttgaaagcctctgcagccatactacaaagcttaggcacagaagccctttcatctcacatgtcagtcttagagcgcgacactgacagattgttagtatatcatccaagttcaacaaggtcagtgccaacttacctccattcgtgcttctcgtcaccgtattggataccctccatccagttcttcatctggagagcaatctcacccgcctcctcatccgccttcaaaccacagtcaaccgtcttacctctgtagctgatgttacgaacagggctgacgatggcagcagtaccggaaccgaatacctcgatcatgcggccctcctcggctgcctcggcaacctcggacatgcgaatcttgcgctcgcaaatcttccagcccttggggccgagtctctcacgggcgagagtcagaacggagtcacgagtgacaccctccaagatcgtaccgtcaagaggagcagtgataagctccttctctccggtctccttgttcttcaaagcaatgaaaaggttcatggtgccgacctcggtaacatattcctcctcgccgaagagccacaggttctgctggaaaccacgggatgcggcctcgagttgaggcagaatgcagggagcgtagttggctccaagcttcttgtcaccaacaccgccgggccaggcgcggacggcgtaatcagtggcctccagggagatggccttgaacccagttgggtagtagggacccacggggctggcaatcacgtacagaagagcggatcctggtgggccaactcccagggtcttctgggtaccaatcatggtagggcgcaggtacaaggagtagccgcgagcgctgtggaggttagcaaggatgtccatctaatctacacaagatacactcactcaggaatgaaccgactatcgagcttcaccaattctccaataatcttcgtcagggcgtcaccatcaatagtaggaagggcaatgcgcgccgaagacttgttcaggcgttccatgttcttattggggcggaacagacggatgccaccggtgctgtccttgtacgccttcataccctcgaagcattcaaatgcgtagtggaacacacaggtcgcagggtccaagctgaggttctggtaggggataatgcgaggtgcgtgccatccgtctgtagctgtccactccacggagagcatgtgatctacattacatccggtcagggtctggaaggcaatagagcgcagagtttctcttacctgtgaagtactttccgaaaacaagatccttggattcctttagctccttaggggtggtggtcttggtgatagtcaatttggaagggtcaagacccgggagctgggaggcggctgccatagaggcgctgaaagttctctgccatgtccggctggcggtaatgttctgtgatgagaggacacggggcattgagagcccggtcagagcctgtcggcgagcgaattggtgaagcgacttcatgactgtggtgatgttaggaacgatccaagggccagccaagggtatagagagtgaagagtgtggcaattgagtcactgggagaagtataaacgtactgaaatcgaggaggtcaatggaggtttatatcacaaccagaaagatgactccgcgccagaactgcagcctctctgcggagctcgacaacaactccgatgactcggaggccccaatcaggaagttctgccaccgccctacagataaagattgtcgctgccaatcagcgactgcaaattagagttgcccgccgacttcggctagttcggcttcctttggcttgctgcggcttgcatcggttacgaccgagctcggtagggcttcaggcctgaggcacatgccaatagtttatttatgcctaaggcaacataccagctattgacacgatcacgtgataatatcgattggaagagtgcctgttatcgaggacctgaggtcgtattgcgccggattattgaccaagtatgcaaccagtggacaatttctctcagcctttgagctaatgttcttaacctcccattagccatcgagtttcaacaccggtccaccttccatagaccctctttctaaatcccaccgttgttgaaactaaatatgtcttatgctggctacaccgtgacgacactgtgaaacgaacaactcccttcattccgactatcgtgccgaccaattctcgtctgcggccttaccaccatgttttcgtctgcgctcaaatcgttcagttccaacatttccgcccattaccagatctcacctaaccctaccgtctactccggcccctggaaaatccacgatgcaaagaagaagtccacaggaacggcggcatcggtgtttatatttgatcgcaagtcactggagacacgctctaatgggttcggaaggagttctgggtcctccgccaagaagctacaggacgatgtgatcgaacgactcaagcgcgaagcaagcaatctcgcgcgcctacggcacccatctattcttcaggtactcgagcctgtggaggagacacgtaatgggggtctcatgtttgccacagaacatctcaccgcttcactttccgggctgctgctggaaaaagatgaccaagagaataccacacgcgccggttcgcggaccagccgggacctggtgtaggagnnnnnnnnnnnnnnnnnnnnnnnnnnnnnnnnnnnnnnnnnnnnnnnnnnnnnnnnnnnnnnnnnnnnnnnnnnnnnnnnnnnnnnnnnnnnnnnnnnnnnnnnnnnnnnnnnnnnnnnnnnnnnnnnnnnnnnnnnnnnnnnnnnnnnnnnnnnnnnnnnnnnnnnnnnnnnnnnnnnnnnnnnnnnnnnnnnnnnnnnnnnnnnnnnnnnnnnnnnnnnnnnnnnnnagcccccgccggccggctgggggacccggccggtacgtggttgaggaggctgacgggactcggagaagaagagaggtggagatggatgagttggaaattcaaaagggactcttgcaagttgctaaaggtcttgaattccttcacgagtctgcgggcttagtgcatggaaatctgaacccggaggccatctatatcaattccaaatcagattggaagatctctggtctgggatttgcggggcctccagactcttctgaaactcgttcgacgctaccgccattggctgtgtccgaggttctctatcaagaaccaaggctgcccgcttcggtacaattgaaccttgattacacgtcgcctgactttgccatggactccaatgtgtctgcggccgccgatctattctctttagggctcatcatcatcgctctgtacaactctccgcatgtctcgcctttacaaacgcacgcaaatttgtccacatataagaaactgctgagctctccgtcttccactccgtcacagagcaataatttcctcagttcgaagccgattcccaagggtctactttctgatgtcctaccgaggctcattacccgaaggcctgcccagcgcatgaatgctcgagaattccagcaagcacagtacttcgacaatgtgttagtttccactatccggtttctggaatctttgccaacaaaaaatcccaatgagaagactcaattcttgcgtggcttacaacgggtactacctgagttcccggtttctgtcctagagagaaagctattgggagccttgatggacgaactcaaggatcgggaattgcttccgctcatattgcaaaacgtgttcggtattcttaagcggattcccaacggacgccgtgtattcccagagaaaatcatgcctcgtctaaaggaagtctttggagctggctcgggcaagggggctgctgaacgagactccaagaaagatgctggtctcatggttgtgcttgataatatgaagctgattgctgataattgttcagggatggagttcaaagatggtgagttttgtaaatggaaacctttgagcttaaatctcacgcttctttctagatattctacccttgattcggctcggactggattctcccactcattctttggtggatgcttccctcaaatgcctccctgtgatgctcccagttcttgatttcagcactgtcaagaatgaggtattccctcccattgctgccacttttagtcgcactagcagcctcgctatcaaggttcgcagtttggaagctttcagtgtactttgcggcgcctctgcagaaggttcagacgggtttgacgatgatttgtctggaatccaggcgactaagtcaaaaccagccaagtcctcgatattggacaagtatactattcaagaaaagctcgtcccgtctctcaaagggattaaaacgaaagagccgtcggtgatgatggcagcgttgaaggtgtttcgtcaagttggaactatcgcagataccgaattcctggctttggaagttctgccggttctctggagtttcagtctcgggccacttttgagccttcaacagttcaatacctttatggctctgataaaaaccctctcagcgaagattgaacaggagcaaagcaaaaagctgcaagagctatcctctggcgctggaccaacgggtttccaaactggtgccgacgaattttcgcagtctgccactggcctgggctcgcccgatgcggacggcggcgctggcagcttcgagcgccttgttcttgggaagaaggcattgcctgcaaatggccagagtatagatatgtggggtagtatggagccagccaagccagcggttccaagcatgctgccttcattctcgtggtcttcaaataatgtaggcatgacaccccaagccaatgccttaagccaacagtccaatcttggattccgttccattactccagatcagaaattgggttctttcccggctcttgctccttctcggcaagcttcaccggttgtccaagccttccctactatgcagccctcatcttctacctggggagccccagccaatgccaatgttcggtcccatacaggcccaacaggtcagtctttggggtccatgtcgactatgataccctcgaatcatatgtccgggtcaacggcgcaaccggcacccaactactcctcgttctcaatcccccctcctcctacaggaaacatggtgtccaacaacgctacgagaccccctccgatgaacacagccaacagatcaacgtctttccaaggcaccgccgcgacaccacaggcaacgcaaaagcaagggttggacaagtatgagagtctgatataaggaacaattcttgttattttctggctgatacaccttttgattgctgttattgctgcttttgcacattcccggcatagtaaatagtcgcagcagcagttgtaattaagaaaagtgacaaaagaacattcaattagcaaatcagcccatgccaagcaatgtagatcgggactccatcggtgatccggccgttggctagggagacacgtacctgattggtgcctcttcatactctatgtcatacttcgtcgttaaacccctccatatgcactcaatgcgtggcattgcgccgcatttgtcctcccggagctccgtgtcacctttgttacccctccatcgaatctcacgccggttgactcccagactggcaaagaccttctcctcgtatactcatctaactcgcgccgccatggacctgagcatcaaacagcactatctggctgactcacctccgaccgtggtcagactggaagtcaagtcacactttgatacactcaaagaccaaaacttgagaaaatatgcgcactttatgagcaggtatcgtgttcctggattccacctcaagagctattgacagctaacctttctcgttatacagggccgcgtttgagggcactcgagtcaccctgcgccaggtctcccccgagtccgaacctatatacgacctcatcctgtcactctaccacgccgccaatggcgactggaacagcctcgcccagaaaacacaagtcagtcccgacgacctccgtttcttcctcgaatatgcgagtcaattcttgggcaactgcggaaactataagggctttggtgactcaaagttcatccctcggctgtccgtctccgcattcgaggctctggcatcggcgaccgcggagacaaaggcagctttccagaaggcgaacaccaccggaggagggatctacgagaccagcgaaggatcgatgatgcacctcggatatcccaagggcggccacatgaccacctactaccccgattcgccaacaatctcaaaggaggaaatcacggcagttggtgacttgatggagaagaagggacttgcgttggagaatactagactccggaagacatcctcgggtgatttcgagcttttgatcgcgtctggtgtttcgtcgcctcctgtgagggaccgggatctcggcgatgtggacacatttgagcttgacggagatctgaagggaaagaaactgcgtcttgtcttcggtgaccatcaggaggagatggcaaagatcgcgcacagcatcaagcaggcagaactttctgctgcaaatgataatcagaagaagatgttggactcatatgctctctcgttcggagctggatccatcgaggctttcaaggagagccagcgcatctgggttaaggaccaaaagcctgttctggagacgaacctgggctttgttgaaacatacagagacccccacggtgtgcgcggagaatgggagggcttcgttgctttggtatgacatgtgctagatcttcattggccggtatcgctaacattcgcaggtcaatctggagcgcacccgcgcctttggtacgctggttgatagtgccgagagcatgattcccaagctgccctggggtaaggactttgagaaagacaagttcctcagccccgacttcacatcattggaagtgttgagtttcgccggctcgggtctcccagctggcatcaacctgcccaactatgatgacattcgccagaaccttggcttcaagaacgtgtctctgggcaatgttctcagcgccaaggctcctaacgaggctattcctttcattgccgagaatgaccaggaggtctaccgctcattccgggacccggcttttgaggttcaagtcggtatccatgaattgctgggtcatggaactggcaagctgttgcaggagacagcgccaggggagtacaactttgatattaagaacccacccatcagccccgtcaccaacaagcccatttcgacctggtacaagcctggacagacatggagctcagtctttggttccattgcttcgtcatacgaggagtgccgtgccgagtgcgtggccatggttcttggctgcgactttggcatcctgaagatcttcggattcggcgatggcaaggaagacttggctggtgaggccggcgacgtcctgttcgcggcctacctttccatggctcgcgccggtctggtcgccctggaattctgggatccgaagacccagaaatggggccaagcacacatgcaggctcggtacagtattctgcgcaccttcctcgatgctggtgatgactttgttaagttgtcttacaagaaggaggatctctctgatctagagatccatcttgatcggtctaagatcctgactcatggacgtcctgccgtagagaagtacctccagaagctgcatgtctacaaaagtaccgcagatattgaggctggtaagggcttgtacgacgatattacctccgttgacagctggtggggaacctccgttcgtgaggtcgttttgaaaaagaaggttccacgcaagatctttgtgcaggccaatactattctggagggtgaccaggtcaccttgaaggagtatgaaccgaccctcgagggtctgattcagagctatgcagagcgtaacgtctgatatatttatatacagtatacaaatgaaatgcatatatattatatatctctttcccatggaagtagctacatatacatatcaatagcctcctttgtgatgtcttcccagatccgtttggacgacctttgtgtgactacccctattccacaccaaactactccaacagctcaggatttctagactaggtcgtatttgattctttccgctcccttgctattcatcgtaaaatccaagtcaagactatgcggcggatggacattccaagattgtacacaaaccctggactataaaatgatagatcaatagtacaacatagtcaggtggggaccggctgggaataggtcaacacatctgactgacttcgagtcacgcccatttcatctcgcaataatgttcctgtaaaatagaaactcgaaattgaatccaaactaaaacgaaactaaagtacaagacagaggacaccatatgtgccaagtttcgatggtgaggcgctcggacttaccgccgtccaagttgatctacccgtcttccccaacctctaagcgctctccttctccaacactcaatcactgcgaatctagcagatgaaagcttatatctgttcaactccctttggaaacaatcctttcttcaaccaggtgctggaagtcagtcattgaattggaaagactcgccgacacagcaacttggacgacactcgacccagatcagtcgcattgctagactaggtcagaattcgatcatctcgattgcgcatatcagcctgtctgactgattcaggcaataatagaaaccacggtgtcgcgagaaacgccgccgtcggacccatcaaccacggcgtgcccgccccatccaacggactccctagaggaggacgacgattattacactgcacctccaccgcactccccagcatcagtgtcaagttcctccaccgcatatcctccgccattttcgtctcttaccttttcgttaccgcaagacacaaatcgcccttacaaagttactgagcctggacccgcttgtcctccagccttagcgcctccagcacctgtcgaggagtcgctcgagccggccccatcttcggcagttgttgctgatacaaaagcgtctttcaccgaaccaaaaaacgagggctcttccgacgacggtgaaccaccaccaccatatacagaaggctatagtccacttgagtcattcacctacgtgatggctgctgcaggaggtgcctccagtataataacccaggtccagcagaccgggggtccgccaatcaacactcttggtggtatgtttgtaccactgccgcttggtatgctttgcgctaacagggtataatagatatcggcggagatgaacatgttggtctcgaccttcggtaggtcacaaattgatatatctcaattatgcatagtctaacaagttgatagtggtacgcgctttaccctttcgcgggatgagctgttgactttgcctgaatttgttctgctctccctcttccccaatggcctcctcccggatggacatgctgcaaatggtttccacgatggggatgtattcccggttgacgtacgcgaatccctatcttgagtattgaattctttctgacatttattatccagtatgacccagtctcacttcagtacatgctggatttcttccggactgtcgcccaaaccatccccgcatctctgccttccagctcaaactcgccagaaatggaaatgcaggacccattgcagggctcagcccgtgacatgctgcaagaccgtgctggcattattgttctccgtgaggaccttgacttttatgtgatccctccctacgccgatattggacacgatgaaatgcttgaagtcaagcgggcggccggcagatcactgttgaaacaggacggcatcttttctggactgcgcaagagcgaggagattggatcaaccgagcagcatcttattgaaatgctgacagctgggtgagtagaaccgggttctcaattatggggccaacgctaatatacaatatagaggatttgatcgttctgaccagtggggccaccgtgctccagagcccaacaaggcagtaatctgcagtcttgcgctggccaaactccgcactgacatccgcggagacctgtcaaacaacaattctgtgggcatggcccagaagcttctcctcttttggcgcaagcctgcccgccgctgctggtgggagggtatcgagctggacgacgtcgagggcgtcgagggacaagtaaaggtctggatccggcgtgtgtggactttggagatggtaagccccctattctcagttgactcaaaattcttgatagctaatcccttcgcagagtgttattgggctccgctaattttgtcccccttattctttcctttgcatgtgcgattatcattcccccggccttacggctcgaagtttcgactgttatttttttctaaagttgcattgaaatatgtctgcaacaaatattcaagtttccatcttaccagcagcagcgctgtactcagcattttggtgtactcattcctttcaatgtattcattttctagtcgattggtaaacgctttcatggacatcactttgacagtgaaggttggatatatggtgcagatctagtttgcaactgtagccttctcctcacatgtcgtttgcttgttttgtgagccttgtatccatacggcaataggctcagtccactacgtagcagaacagcaggcaaatgccagtgcctcttgatgatgctagacctggacttggactgcacgaccatggatgatcgcggtcttgacaggactctgcctagcctggcgcatctaaaattcgtgctcgaaatcaaaggttggccagcgggtgagtttatggtcacataggacgcagagctctgactcaggaaagtagaacgtgccgattgaaaccgcattgggcgtctaaaagaagacggtgtagaagccgcagaagaagtccgaaaaggccgcgctctgcacgcgacggcaccagactactgcatatagtagaatacttccgtcttgactgcacatctcgaacagatacgaccatacccaaccctaccggtctgccagaaatgcactcgaaccaactaagaatgccctggtatcgtgatgagctgtcgctgatgtttcatgatgaaactgaatccccacgatcatgcaagaaataccgaggcagtgatggtggactttggggaaccatttttcagaaaggtcctcttctcacagacgtccttctctcgcggatgtcctcttgttacagacgcatttcacggacatgctcgaatgaagcagatggagtgacggataagctatgctatacctttttgtaacaccatgctttttatattcagtgaccaagggagaccatttacaaactttgatgtatagaactacaatggttcggtgtgaggcatagcacgtgatgccctacctggaacaggactagcgtcgaatttggcaaagtcgcgcagaatatcgatcccagagccattctccagctgtattctttctggatacctttgacacgatcttaactttttttctaccacgttactatatgccgtggaatcatacaagtacttgttgttaactttcttgcgcttgggccattcccaattgtgcctcactgcagtgatcagcccttcgaacatcgagccgatcaaaacaatcgcaagctcgttcttttctcgcgcataccctcgaagaggcatgttcttgtgcaattgaatcgccaacatgtctcctcttcggggctatatcagttcctaccctccgcgcatgcgccattatggaaacgcgttgctcacacctgtcaatcctccgtctcaaaccggcccgactccgcgcaccacgaagcgtggaactacagccatcaattatgctgaagacggcttcgatgacgaggatttcgatgagactgatgggccccggcgcccgacgggactgcgaagtcttcggcgcgaagaatccgccactgacaagtcggtgccctactcggagaagctgggcaaagaagtgcatgcgcccgtggaggtgcaaggcctctttcgcgagtggatgatcaagagaatgttgcgaccagcgtatgttccctattgccagggctgatgtggccattaacgacagtggcctctgtcttccctgtctatccttggatctggctaacatacagcgtggtgattctaggtgtgccgatcaactgcagattcaagcgcaactccccttgacgctcgttcccatccgaattgatgtcgaagtccccgctcatcaacccctcgaaccattccccttcccacgcgcagtcgtggaccctaacgtcacccacgctcttcctgcctatcgcagacctgaaccattacccccgttccgcattaaggatactttcttgtggaacctccatgaatcactctcaacgccggaggaatttgctattggattcgtccgcgatctcgatctcccaaatccccaggctacgactatgaccatcagcaaccagatccgacagcagctggaggaatacgctggtgttgctcttcacccactttttcagagcacagacgcaggcacagtgcccagcgttctgccacatacagagccgtcaagagagacaccaacgacaccagctgctgccgttgcgacacctgatagccggcccaatgtgacgaccactgtaactgtgacgaaggaaccgctggtgaatgacagccttttgaacccagatgacgcatatcggtgcttgatcaccctcaatatcaacctgcaaaacaagctgtacacagacaaattcgagtggtctctgctacacccacctggcatggctgaagagtttgcacgcatcacttgcgctgatctcagccttggtggtgaatgggttagtgcaattgcacatgccatctacgaagcagtcttgaagttcaaaaaagaagtctgcgaaagcggtgctcttgttagcggctacggcaatgacattgacaatttggcagccaacggcgtggaggctggctggcggtacgaccctgaaaccatttgtgatgagtggcagcctcaagttgagactctgtccaaggaggaaatcgaacggagagagggtgaccgtgagcgtcagatccgacgtctgcgccgagaaacagccaggttctcttcaaccacgggcatcacacctgagatctcacgacaggccagtggcaattacttcgaggtggatagcgagactccgctgggacgtggagaaagaaacaagcgcaagcgccgattccgcagcttgagcccttcaggcagaagtggcactcctggaggccggggaactcctgatactggatcaggggcaggatacggtggcggtggcggcacgctctccgagtggtatgtgctgccagatacatattgttggaatattcactaatgattctgcttagggaacgtcaaagctggagatgcaagaactgcgcggtgtggggcacagcagtttgggctgtgcgtgatggtccagatggcccacgggtaagtctttactttagaatgtcttgcaaacagtctctaaccatcctctgtagacactctgccacaactgtggcctgctctatgagcgtgataaggttgtaccggaatggtccaaggatcttcatcgtcacgacgtgcccatcggtcgatatggctaaatcaacgccattttccttgcatcgccttaatgtactttcctaagcttcaatgaccttcctcacgccaccatttctcctttctccgtgttctttcaacatttaatccgctattggtgcactttcaatcgatccggcgttacggcgcatcgccttgttatgttgcagatcgatttccatccgcaaaattcgggggcgttactgtcattgtgaatccacatgtttctctcagtcgacgtctttctgtcttgcctccagcacatgttttcgatggatggctagaaggcaaagagctaggaactagagtagaaatgcaatcagattagccaatgatccactttgaagtacaaccgatctttgatattgatgacattaaaacatttgcaaatggtcttgtagacttacctccctcacatccttttattgatttatggatattctggaatgaagtgaaacatccctgtcttaattatactcgacaaggtcatccttcacgacgagcctaaccagtctggcactgactcaacaaatcaaccctcaaggaacttcagaatatgatcaaagccctcaggcgccttaacccaatgcccatccccctccgcacccgtaaactcctcccagtcaacacgtcccacaatcttcctcagaacctgacaagcctgccgcccaagctcaacagatacccacggatcatcagccccatgactcaaaaacacaggcgtctccaaaaccgcaccaccaccaaccttaccctcaggcaccacctccccagcaccagcaatctgctcaaaatagaaccccgaaatcaaactccgcgtctgcgcactcccaggcccaagctccggctcagacaacaaccactcaagctgctgcgcaaacggcaaccacccacaaaagcccagcagcccacccagcgggccctgaaagcggcccgtcgccgacgcagccaggaacgcccacaacgccgtcgccatgccctggctcatcccgccgagatagatattaccgtatttcccatctagcaggcgcgcctcgtcgtcgatgatagagaggatgttggcgatggactcgcggagtccggccttctgtagctcctggtgctcgtatatgttgtcgagtgagtatgcgtcaaaccacgcgcacatctcttctttaaaggctgtgctccatcggttgcgggatgttgggaacacccagcggtaggaggggaggttggacggcaggttcttgccgttggaggtttcggatgagaagagctctgaggcgaactcgccgccgtcgctgccgcggccgtgtaggaggatcacggtgtgtgtgtgtgtggtttggggtgggtggatgtgggatttggggaattccatgcttgcgagctgtttggatatgtgtttttggtgagttgggattccaatcggatttcggtgatgtcagatatgggggggttctcagctcccccgcaagatgttagatagcggttagcgatagcggtcagctaactacaacataaggtacgttatagacgaccatcttctgcagtataaactacaattcaagagcactctcctataacttttccttcctagctaatacccaatggaacccaacactcttcccacctccattatcctcttcccgatccaccgtaacctcatcaacctcaatcccaaacccaatctctttaagaaccctccgcacctcatccctcccacacccactccaatgcatagcgccctccgtagcccccaaccaagaaccattagtcgagctctcaaacgcggcctcggagaaattcgccagaagccggcccccaggcttcaaccagccgaatatccgacgcagcatcgtagtctgctccatgcgcggcagatggaaaatggaatacatggccatcacggcgtcgaactgctctgcgctgaattccagctccatcatgtcgcctaggatcaggtttacggagggagagagtcgctctttggccagggcgatttgtgtcgatgatatgtcatttgcggttatgctaatgtgggcgtgtgaggatagcagctgggtgcagggtacgccggcgccgcagcctagctcgaggatgttgagttggtgggtttcttttgcggagtggatggattgaaggaggaggtcgaggtaggagaggcgggtttcgtgcgagggttttgtccaggttaggtagactgaggcgatttcattgtaggcttttttgatgtcggatttgattttgtggttggtggtttcgggcattatggtggttatagtgttggatggtgaatcgattaggaagaaaaccgcgtcagctactctaggcgttctaagtagatgactcattcggtgatttactgtctataaggctaatttacgagactggtgattggatattctcttctgattgagtctagccaaaaaaattagagtaggtagctgtcatttatattaacatgaatctccccaactgtgacaccttactctctcgggaaaggccatttccagttgcgaatatgttcagcatcaataccattatcgagtgcctcggacctgcccgcaatctgctcattgagcaacttctctctcacgccatcggccgtgttaccaagagattgaaccgagtcaatggcagccatagcgagactgtatcgatcggttccattgcgcacagccagctcgaacggtgtgtcgatgttgcccttctccttgtaacctctcacgtgcaggttatgttgacccacacgcttgtaggtgagccggtgaatgagccaggggtaggagtggaagttgaatatgatgggcgtgtcgttggtgaagatggacttccatctcgcgtcggacaatccgtggggatggttgacaggggagatcaggcggaagagatccaccacattaacaaagcggaccttgagctgggggagatgttcacggagtagggcagtcgcggcgagggcttcgtatgttgaaacatcaccgcaggacgccatcacgacatccgggtcttggccttggtcgttgctggcccagtcccagattccgagacccttggtgcagtgcgcgagtgcttcgtccatgttcaggaactggatgtgctcttgtttatcggcgacaaccacattcacgtagttgacactgcggagacagtggtccatcacggacaggagagtgttgccgtcgggtgggagatagatgcggaccacctcggggctcttgttagccactacatcgaggaatccggggtcctggtgactgaagccattgtggtcttgtctccagacagtggcggtaatgaggatgttcagggacgagacgcgggctcgccactcgatttccaagctcttctcgatccacttgcaatgctggttcaccatagaatcaatgacgtgaatgaaaggctcgtagctgttgagcagtccatggcgcccagaaagaatgtagccttccagccagccttcacaggtgtgctcactgaggatctccatcacgcggccatcgggggacagattgccgccgtccttatcttcctcgaagtaatctcccatccagactttcttgcctgccttgtacacctcggcaagcttgttagactccgtctcatcgggcccgaagagtcggaagttgtgcatgttgcgagcgacgatatcacgaaggaatttcgccatgttggccatgcctcccttggttgttatcccagggacgatatcgttgaaaccatagtctcggaaatcaggaatgtccagcgggcggcgcaaaagacctccgttaccaacggggttggcacttatgcgggaggtacccgtgggcgcgagctccctcagttccggaatcaatgtgccgttcttgtcgaagagttcttctggcttgtagcccctcatccatgtctccaagaccttgagatgagcggggttttcgcgcacatcagtgatcgggatttgatgggcgcgccagaatccctcgaggaggtggccgtcaacctcccgtggagcagaccatcccttgggtgtgcgcaggatgatcatgggccagcgggggcggaagggaaccttggagtctcgggctttcttctggtatccccggatctcggtgacacattgctcgagtgtggcggccatcgcttggtgcatgctgtcgaagtcacttccctcgacaaagtatggtttccatccatagccaacgagcaaggaggacagttcggagtgactgattcgtgcaagcacggtggggttattgatcttatatccattgaggtggagaacaggcaggacagctccgtcattgatagggttcaggaattttgtgctgtgccagctggtggcaaggggaccggtctcggactcgccgtcgccgaccatggtcagagtaatgagattggggtggtcataaaccgtgccaaaggcatgagagagtgaatatcccagctcacctccctcgtggatactaccaggtgtctcgggggtggcgtggctgccaatgcctccggggaaagagaattgcttgaagaacttctgcatgccctgcttatcctgacctttctccgggtagacttctgagtagacaccctcgaggtaagactgcgacagaattgcgggggcgccgtggccggggcccgaaacgaacagaacatcgaggtcgtatttcttgatgagacggttcatgtgcatccaggtgaaagcctgcccggcatccgagccccaatggcccaagagtcgagctttgagatgctctagcttcagaggttcttcgaggaggggattgtcgcgaaggtagagcatgcccaaacacaagtacatgctggcgcggaaccaggcattcatcttacgaatggtctcagcatcgaggggctttccttccacggttgagcgagcctctccataggcggagatgctcatttcatccgggattggtgtcatgctgtgtaccactgctgaaccagacatgttgcacgatatgtcggggaaccagtccctgtgtatggtggctcctggggttaagaaagaatggtaaacactggagttggaggtaagacggaataagaacacagaggaaaataatttcaggacaaggcggactttttttttctgttaataagcgggacaattgtttccccctccgactgggagccctatgggccaacgagtcaatgacgtggttgtcatccaacgcacaagcttcgatggtgctacggcgcagagataagcatgcaatccgacccactgccctgtgcacgtgcattattctggcattcataattcttgggtgcttacgttcggtgcctgcccggtgaaaaagtaactaaaaatagcttatttatgcacagtgtaagtgtcatgatgcatcaccggagaaaccccgggaacattcgcgatcgtacgacgtcgccttcgccgtgaaaccgcctttgcccctccgaggccttaagaccgttaccccgcacccgacaccatgtgattcggccgagagtggggaatatcaagtgtcgatctccgagaatcatctcatattaagtaacggacaagtcaacagttggagaacattcgaatcaagtagcagaattcaatccaaaaagtcgcctctggtctcctccacaatcaactcgtactccggctcaaattgcatatacatggcctcgggagaacctgttttttgtttagtataatacgcaacttcatcatccaccaaggccttcagcattccttcgcttgcaccaatcgacccaggtgctatggctgactgcaccaagagctgagtctgacaggccctctccaatgcaataaaaaaggccgccgcttcggcaaccgtcccgcccgccgtaagcaatccatgattctgcatgatcaaattcttgtgcttagggcccagggcatcggcaatcagttgcccctcttccttggcgaaagcaacgcccccaaaagctcgatataccgaaagatcgtcgtagaacatgcaggaatcttcaagcgggaaatagtgtcagtgggaatgtggcgtgcgtggcacaggtcctcttaccctgattcagcatatcaattccccggccaaaagtactccaggctcggccgtagggactgtgcatatgacacacggcatgaatatccggtcgcctctggtggattgcggaatggataataaacccagccgtgttgaccggccgcaattcgccagtgatcttcgttacgcccgagacccgattgccttgttcgtcgacccgcaccatatcagagatcgtgagaaggccgaagtggactccgtatggattgatccagaacgtgtggggttcgatggggtctgtgtgtgcggagtggtgttagaacatgtacaatataggcgaaggatcgcgtaaagcaagcatgcatacctcgcacactgatatggccgctgctaccatctgcgaatcccattttggcaaagatgcgaaacgcgcccgccatctgcgcgaggagccattcccgttcgtcttctttgtcggtgggtcttgggatgtggtgcagcctatttacttcaccattgtcacttgtttcggtgttcaaagcagaagtgtttaaagcaggagtaaccggctttgctcgatctttagacacgtatgataacatcttgtgcgcttttgatttgggtgagtgaggaaagatggtgggaccgaggcaaataaatactaccccgcggaaccattggctattcgatgactcgacgatttttgtatatacaacctatcaaaggacagctacgtctgtattcgcctttggtggaatagaagggtctacttgccctattcgtatggtcctccgtaccactgtcggagattgtctttaattaactttttgggcggcagatttgacctggaggactccgtaagtggagaagattgtcatttccacatggctgcggctggacactagactcgagtccccgctagagatcatttcaattgaaaacagttcaatatgagtggtccaaattcaagaaagcaaaaagtccagagcagcgcaacatataatcaaagacaggccacccatctcgcaaattagaacagactgtgccctgtcgccagattcgggtcaagatgaggaaagtcatcaatcggacgaacacgtgcaactgggtagggcgcgttcaattgtgccggtgtcgcggtaggaagagtcctctggccctgtgggatcccagggttatagtcaaaaacccaaagacgcaacgactgatccggacaagttccagtatagaacctgtgccgcagccatgaccctaacagacgatcagcgccggcacgcgttgattgaccactctgaacacaagcggatatcgcttgccagtccggggacatccatttccgttcatcgtagctccacatgttgacttctatttctcggaatatcgaggtgactcggttcccatctgcgagataaagaactccgacgcccatgcatcggggcaaggggtatacgggtccactttctgcttccagattccgaagaacgttgatgtcgtcttcgaataggagcatatgtgtagccccggtgtcatccataaatgggaaatcaaagaaaggtggcctgcttaatggttttgggtctttttcccctttttccttttttctctctccttctcttactgcaatcgctggaaccttcgggatccgaagggcaaccctcacctaaagaggatgattagagagatcactaaagtggccaacagggcaattgaaagggaatagctaccattgtggcattcaaacgtggatccggttggcataccatcgaagccttgctcatgctaggcccaggcccgagaatctgagtatttgttttagtatatctatcgacacagccaagggtctgacacttacaccttcaacccaaaatcctacatgtccctcgtacttgtcatggacgtagcggtattcatcccagtggaaaggtctcggcaagcagagctggactccagaataccagtaggtgacaaggtccggattccaactcaattccccggatcgataccttgcaatgatggctttcaccgtactgaccatcttgtactcgtcgttctcccccgcgagttgatccaatgtgaatttgagatcatctacgcgctgtgcctcgggccaactcaaacctggctctctagccatcagtctcctgggtaggaaggagtaaattagtctctattggggaattcggagttataggatggctcactcgcgttgcgactgctttgcaatgaattctttcattttatgccgataaacatgaggcatgatattctctgcgatccgctcacgacacctttctatctgagctttgaagtcgctgcataaaaggtcaataccaagtatgaaaatgaagtgagccagtatcaactagctagagcaggttgaacttactcgggcatcagatcaggctcctctgggttccagcctttaggcgtgtcttcgagctctgtgatgacatcttttaccattggccatttctgtttcttgggaatttcttgtctaggcttcttccaggtcttcgagtaatcaaccttgagatcggctgcaagaagttcctcgtttaggagttgcgggattcccgtttctgtttttgccttcttcggggcagctccttcatcttccttcaagcttttcttgcgttttgcattgaccctcttgggggcacttttgccgtcaagttttgcggcccgggggagagtagcccttggaggcatcttgcaacagaagatagtcacgaccaaggtgctttctctatgtaactagcaggtcgaatattgaacataaatgaatgatgagtatgaatgacagaattttgagggtatttgtattccattttgtgtacgccgagcccatcgcaccggactggggtttgactatgctgtcaaagaaaacttaaaaggtggtaaacaagatagaacaaagacaggagcatgcccttggagagaggtcgattccacttttccgtgcttttgaaacaccttattgagtgtgtttttgcaaagtatactctcagtggatttgactattgcaaagtatactctcagtggatttgactaggacgattctccaatatgattttggctaatttctttgatattgacagggcttatgctgtttgctgtttgtttgggctctgtctgtgcgaccttctgccgctgtacctgatgttaaaggattcaaagcagcaggatttgtcaaacaaagacttgtggattcaaacccaaagttcagatccttcactcggctcactttcaaaatcatgaaagaacattggctaacttgagctgacctgtagtcatgagaatgagagctgaaaatagattgtggcgcgataaaagacacgtctcagggcgagaaagtgtagaggctggagagccatggagaacaaagaagatctgattcttgccctgtttatttttacacaactcggtatctttgcccagtgcctcacatatgtgatatattcctctttattaagtattttcttatcgtggagtgggtaagctgttgagcctcagtcgcacccatactgatattattgagcagtgctttgttcatcgccagagatgcttgtagcgaaagcctgctgaagctcaatgtcatacctcttcttatcagcaagtttgcctatcacgaatcttggcaggtcttttacccagtaaaagggcatggtttcaccaatttcatcggagcgatgcttagacaacaagggctgaatatgcgaataaaacagatggaacaagccggtcgggctggaaaggccagggaataccagaatgttccagttttccatgcttgttccataacctctgatagtagtaatggcgtgctcccgacctcttttgacaggatactgctagacatttgtgtctcctcactcttcaagatagacatcatttccttgcgagcttcatcaaattcatcgacttcgatcatgtccacagctttattagtcaaccagtaaggaggtgcgaccatttcgataggtagggagcaagcccattccagatcgaccagacaagtgatatgccacttgtcatcaacaaaaattttgctttggtggagatctgtaagtgtgagaacaaaaggcccacgacacaaatctcgacgaaaaaacactggaattagagttcgcattgctgccagtgctgacatctgataaacgcagtcatgtatgtcattcacggaatttagttggtttcgtagacgactgtcatgggctcctaggatatccatcacgtaagactcaaccgtgttgtatgtatagtcacgggatatgtgggttggaacgttctcattctcgaggtcctgaagttccatcgagagaggacggttgcttagagttaggaacccgtccctgttgatgatggatgaactaatgcgaggcaggggggttttgctgaggctcagaaagatcctggacaagtcccggaggaaattacaccgtaactcgctgtcttgttgtttctcggaccatgtattcgcaagcattgtcccttgggtttcttcgatgcattgtagcaacaagtatccagcactagcaacgcgaccaggaagcgcttccgtctgatttggattgaggatatagttcgaaggtactgggaggcaaaaccagtttagtagccggcggcgtagggattggaagcaacggcccggaaagggcagttggtccaattctgtgaactattctcgacaattagattaatatattggagatggagtaggtctcgtacagtttcacctgtagacaacgcgaagccatataaccgtggaattggaatatccgggcaattctgctggagccatgcataggtcccagcttcacattggatcttttcatccccgttcccgggcctaaagtcatccccgatacggtaggggagcggaaatcggagtatgacccgttttcttggttgctgtctactgttctggatagagataggaatgcagatattgaaactgccacggagccagtacctcacttctgaaacatggcacttatcgcttgagctcagccctagtggtgagcaacagtagctttcatccactcgcgtctatcgtcgagatatgaaaagaagcggtcttgttggccatagtagcccaaatggtggagtatgtcactctcctgatccttggcgaaagaataggtaatttctcccttgagaaggcggcgcgtcatgattgggagcaaaccaaggtgctacccggactagtattgactttggctgtgtccccacaaagcagagttcgtgggtgagatctggggaaggggcgatcctcccgggacggacagatgttttgccgaagtagcgaatatcatcagccttcgggcacctgacagtcctggaggtaagcttagttactttgtttctctcaaaatcaggtgttaggacgaacacacctcgaaatatatagtcagaatgcgagattcgttgatttgcgaaaaagctataaaaccaaaagtcaaccctaaacacaaagccgtatatcttgcgaaaatgtaaggacgttgcgatacgaagtttagctgtagttccatatctcgattatatgcaatcgatgcctcattcaagcacctttgcaggttactggtagcgtcaataatctcacactgctggtcaaccgattggccgattcagtacagtacccagaacaggcagttggttattgcatagcgtcggccctaaatgccaaatctaaatatcaccgttttcatggtagtaaagtaagaagaagcatcaaactagatggaaagttacataacagccatctagtatacaacgcattcataaaaggacaggatatcagctcataacaaaccaaccaaaaattgcaaaactccgctaagcaaagggagtgaaaagtgagcaaagtctaagagaacaaaaccaaaaagtgacaacattctgagattatcgaaagcaaaaagcgggagacattcagcttctcataaagcaactcataacctatattcaagacgaacgggagcgctgagtcggcggagctcccaaaggctcctgtattgatcagtcagtgatgaaacctcttgaagattcttttgcggagtaaagtacgaaccgagctggcacgacgcttgcggccgcttcgttcttcgccgacgttgtcagtctcattctcagacctgcgagcctcgcgcccgacgcaaatgctgttgtttcggccgttgacccggatgcccgagagagcgcgaatgttgatgggccgggggtagcccacatcgtcgttcagggcatttgcgcggctcagcgcagcgatgatgacagccgccatagagttaatacggggggatgttggggcctcctggggagttgaatcagtgggagtatcaactccagaaggcgacaccatgatggtgttttcgtcaccagttatggtgatcgagttgtcaatgtaaatattgattggggaagcccatggctcgtccatgtcgttctgatccacgctcatgacagttgtgccgctgggtctggtcacagacaacgtgtacgggggtggagctgtgcctagagtggacgtagaggcagacgtagatatagaagaagtgttgcgatttgcccggacttcggcgagcttacttagatggtgtcgcaaagagtctgatggaggcaacattgtgaatgaagttatgatactttttagtcgtgtttgtagatatgaccagagtgaagtatggctgagtgaagaagagaagtgcaacagcgggttatctgagtatttatggtcaagcgtttgttcattccgtttgaatgggcgcaaacaataggaaaagtacaatcaataaacaatcaatagacagccaatcagaggctgtcaggggccattgacttgcctaattgggagccttgaatggatttctattgttctcaatagagatcacgtgactgctattgttcatggggtatcaatagaagaaaaactatgtacctggtaccttcgccaagatgggcaccaccgtaatcaagaaggtacatgtacatccagtaccatggtttcgctagtgtagaaaatgcgcctccaattgtcttccaaaaaagcaaaccgggacgctgcggcggtccaccagcccctgactgtggagcagtccttcgtagagcgtgtttgtgtcactgtaaccaaacgaactggatcccagatgatcggatgttccttcttcggccggtcggaaatctctgctgatggctacaccatctgggaagtgggcacgtctggtcaggttattggctggtatttcacaggcgcagggtatcaaaccctaccgataaggttgtgtggctccttactgctagacgggatatcggagccagagtggtctgggtgaggttggcccgggtagtatcgaccacctgggtgaagtgattgcaccgtctgcaaatacttattagcaaggacaacagcccttgtagattgcccgagttataccggtgtttctgtcgcgtccgacatccgaaccgttacgggttggtactgacttcgcggaaatcatccccttcaacttccacctcgcgatctcgaatccggcgcatcaaagccatgaaattgctttgttggaatttttcacttgtttcgttgcgcacgctgtcgagcagttgccctgctgtccgcgcaagttcatcggcatctcgattccgtgtttctggatcctgcttttcacttttgggaatgagatccgatccgagtcgaatatgctcttgggtaactggctcaggaatgccgacttcattggtctcctgcgactgcttctgagtatctagttgagcagcatcgactccttgcaactccatatctgcccgggcctgatcaaaggcagcctcaaaggcggattcgtcaaactgttgcatgtggtgttgctcagtctgcataacctgcgagggctgcatctgattcatggaggatccatacatctggtagcttggtgcaaaagctggttgataggcaccatgcatttgcggggtttgctgtgtctgggacataggccctcgttgttgggtcatgaattcagagtgccacccgccatgcgccgtggctggcgcaatatttggtctttgtagttgcgctacagggtgtgcgggccccgagatttgcaagttctggaagtccgatgcccaactggcgttggctgcaccatgtgcagctggatggtgtactgcagcatgatgtgatggtgctccaaaatgggccggatgttgtaagttaggcaatgcagggccagcaaagttgccttcgaatgcggcgaactccgggtcgagtattccttcttgggggttctgggatcggaaaccctgtagtatgcgtttagcatgaatgaaacaatgcaatcccaaaagagctaccaacctgagcaggcgattgacgggaagtcaaccggtcttgctgaagggtccgatcaacagaggtatgcttctggaagttctgaagggcgttcgacggcccgcacagcgcatcacccataatgacctgcttagatcgaccaactgagcaagaaatgtgatatggtgactgtggctttcaaatctctctgtaatcagtttccaggacagattgcagcaaatataggaatgaaggtgtcggacttcaaaagaaactccacgccaccgcgtcgtggggttaccgatgaccgaggctcatcacgtgcatatatccaggtaacgtgacctagcacacgataagatacgggaagggccaggttgtttggctaaaagggagagagctaccccgactccgcgcgctttcacagctattaacttcttgtttgctttatttattcaacatggtaactaatattccgccacattgctttgagcttgttccacaatcccatcgctaacagcttcaaacctccaggcggcccctcaggtgatctcgaattccggacacgaagagatgattgtatgtgctaagataggaattgcaactggtgatctatgtggttacacaatgtacgtgagctaactacgtatgttgaatagcacgatgctggcttggactattacggccgccggttggccacatgttcatccgacaaaacgataaagatctttgagattgagggagaaacacaccgactagtcgatacactgaaggggtaagctagtcctatcgatgtgtgcaactgggtgttttgtctctaacatttgtggttgatagccacgagggtgctgtgtggtgtatcgcatgggtgagttgacaccaaaacatgagcaattatagtgcgcaatgtgactgaccatgcgattctctcgatttaggcccaccccaaattcggcacaattctagcctcatcttcctacgatggcaaagttctgatctggcgggaacagccccagaatgcgacctcgccctccggtggtagcacatggactaaggtcttcgatttctccctccacacggcctcggtgaatatggtttcctgggctccccatgagagtggatgtcttcttgcctgcgcttcttccgacggccatgtcagcgtgctcgagttccgtgacaacaactggacccaccaaaccttccatgctcacggaatgggcgttaactctatcagctgggcccccgcggcctttgctggtagccttatcagctctaaccccgggcccggccaacagcgccggtttgttaccggtggcagcgacaacctggtcaaaatctgggagtataagtatgtccattgataaaactttccaagcatacagctgtgacgtgaactaactcgttctttagcgcggagtccaaatcttacaacctcactcaaaccctcgagggacacactgactgggtccgtgatgtggcctggtccccgagcatcctctccaagtcctacatcgcctccgccgcgcaagacaagaccgttcgcatttggacctctgatgcttctaacccgggccagtggtccagccaaacattggagttcgacactgttctgtggcgcgttagctggagtctcagcggtaacatccttgccgtcagcggaggtgataacaaggttagtttatggaaggagaacctcaagggggagtgggagaaggtcaaggatatcgaggagtagtggctgttttaatttctatgtgtcatctattcccttcctcaacgcataattctgttctattcaaaagctccattgcttgttaccataaatattgattccagcgaatcctacgcaatttccagagctttgggtgagcttgatatgtttcattccctatctcgtccatctcgtccaccgctcaactcccagaaaaacaaaagaaagaaaggcattaaataaaggcaaatcaaggcaaataaaagagcaaataaaaacgtagaagatatcccgtgtgtctcaagatcagcgcatgactggcgctagccctcacacgtcccagaagatgaatgggcctctggcacctgtttccttcatatccaaccaccgtccaagcatcaggcgcccaccggggatgataacagcctcataaccatggatccagccggggccgtccattacgaggggggaatgcttctcttcatcatcttcatccgcttcggcgatgataaaacagatccgcatccatccctcaaagccaccatgtgaaacagcaatctcttcggtaaacccgaatacgtggtttcccgcctcatgggcgccactataggctctctgcttgccatcgaaatatgtccgtttgatattgcggcctttagcgagaggcatgatcttactgcattgcttgggccaaaactcttcggaggttgcgaggtcaagggtctgacatttgttaatatagccttgcaagaaactcgccttccactcaccatgatctcgaccccgtcaccgtgtgtctcaagatcagcgcatgactggcgctcgttgtcttgcaggtctgatatcggatgcatgcatgctaattgaaatttgaaatcagctcggggtcatgattgggttttccccctgttggtatactcacagtagtatcctagccacgatgagcttagtttggattcctcgattggaagctcctttcgtgtcttgggcttcatctctgcaggcagcgcggagaaggattcctggaaggtgaactcggaggtgttcaaaagatgacgttgccagaaattgcgcaggttcagcagtttgacgagatcgagctttttgtggtcgatatatgccttgcccagcttctctccatatgcgtaaacctgtttgatgtcgtagtcggttcgacggcagtgatcggtgatcgttggatcgagagcaaacgcactcaggctctgtgtatggatatcagtgaatgtccaatccattattcgacgaaacatgcgtacaagctggagaccataaaagagttttgaggaaggttctttctgaaattcgctcaaaaaatccaccttctcgagtttctcctgtatgcattgcagggtctttggggtcgatccaggaacgatggttagttgcagagactcctcgagcatagtctgcatgacctccatccagaggaattggcgatcatcttccttctctttgaatctgatcgtagcgcccagcacaatggcacggatttggtattcgatcttcaactcccctgaatttttccccggaacaatatcgtagtgtttaccaaagagatatcgccagacggacgagtcggacccgaagaccttgttccacatctctttgcaagactgggagagatggaaaacatcacgatcgttagggagatagcatgcaatgtcctggagaacctgttgttctcaaacattaatagctgcaacctagaactatagacatatacttacctcattcggaagctcgagcagtcggcttggagcacttggcatggcaactgaatcggaccgcacggggttgttggacgacatgtctgtagttgcggtattattcggtatgtatacctatgtacttcgatgtgaggcggaagatgtgaacagaagacgtatgtgcaagaacaaaattcagaataaaaggcgatagatattcggcgcgaacgttcatgtatagcattcggtgtgtttgtctatgcactttgatgtaaggtagaagatgtatgaagggaggatgtaagtgcaaagagcgaatttcgaatcaaaggcgagaggtattcggcgtgcgccttcacttgtccatgtggtatagcatttggtatgtatacctatatgacgtgaggtgaagatgtgaacagaagatgtaaagtgcaaagagcgacctaggaataagaggctacggatagtcagcgcacacgttcacttatccttatgacatagcattcggtatgtatacctatgcagttcgatacgaggcggaagacgtaagaaagaagaggtaaaggacgaagagcgaatctgggaataagaggtaatatatattcggaccgcgcgttgtcttgtccttagagtgattcatttcgaatatgcgatatcatttttgatttcagttcgaacatcgggacaatatgggtccgcaactaaatcgggtgaagctacttatatttgcgtgatgagattcgcctcacaagtgacagcgcaacaataaacgataaagagcgacaaagaggtccgcggttcgaatttacctcttcacgttccagagattgatagattttcttcacacgctatatatgccgtgagaggctatgtcgctgtaagctttctttcacgccccagccatctgctaacaggcccttgacttcctctaggctaagtccactcatctcggggtagattgcccatacagcaacccatccacccacacagacgagtgcatagagagcaaacgtccatgagggagagatcaattccatcataggcaagaaagtaagaccgatgataaagttggatccccagttggttgcagtggccagtgctgaccctagggaacgtacattcagagggaagagctcagactgctgccaagggacgttgccgagcccaagggcatatgccgccgtatagacagtaaggcaaagcagaattgcaaggggcacaagggaattagtgctatcatggttttcttggtgatcagttggaggttgtggattccatttgccatccattgacgagaacgagaaagcacagacgaccagagcaacgaccatgacaggtattgaatacaggagaatgcgccggcgaccgattctgtcaatcagcacgaatgcaagcagcgtgaagataaagttcgtcatagccaccgagagtgatgtcagtgtcggcgacgagaacgaaagagaggagaagatggttgccgaaaaatacatcaagctgttgaatccgcagagctgttggactgcctggagcatcattgctatgatcaatgctcttctatttccaccatgcaacaactgctgaccccgttggatggtatcatgcaaccactggggctttgtgccacgagacttaactggtcccatctccgacgcctcttggacaatttccgcgttgatattgcgcaagacatgatccaccacccggtcacatccagggcaatcctgatagatcttggacaggactgtcttcgctcgggcatcaaatccagcctggagcagccatcgaggcgtctcgggtagcagagcgaggatggcgagttggaaaaaggccggcaatgcaccaattcccacaatccaccgccaacctccagttgtactagaaaacagccaaccgactatgtatgccaccacctggccaccggtgatgaacagactgaggatcgtcacaagtcttcctcttgcgtgtgaaggagctaactcggatatatacctgattacctagcatgttagcaattaccatctctcttgtaatcaaattgatgccatggcacaggttctcagtccccgcctgacgacaaggccaacctacaatggagtcaccgcactcgcgctaccaacagcaagaccaacaatgctgcgtccaaggatcatcccccaaacctggcttgtaaaggcctgtaccaatgctccaagtgcaaacaacagatccgccccaagtatgactttccgacgaccaaacttgtccgccagcactccggtgaacgggctcgcaatcaacgcaaataagctagtgcatgatgtaatgaggcttttatcgagtgttgtcaatgttcggccggaaaggtctgacccgatggtcaccaaagtagacgagataacacctgtactggaagtttcaacgattgttagtgaacgggaagcaatgaagccggaacatggcgtgtttggtagtagctagcatactcatatccaaatagtaggccgcttatcccagcggaaaaagtcaacatccatatgaaccagcctcctgagtattccagctcagaggccaggctctcatcgtggtcattgccatcatggtcggaataggcgtgggatgaggcgagcaaaggggcgtgggggcccgattggtcttgctcatctgcgcctgtcatatcttcgagctcttccaacttgatcctgaggtatcatccgaattttcaatgttatgcccctgatcccccgaggcatctgagatggtaaagtgacgtccggggctaatcgcgataagccgataaggagacgctcaaagcccgaagcggaactcggattccgcacgtcgatacagttcaagaacaactagagatctatttccatacatatgcactaggatggaatgaaggcctaatatatgaatattgggttgcagaatactaaaagtgtgtaatttagattcatgcaagattcattgtttttacggcattaatgtatacatatatagccctcctagcctagtgtttagccacaacaccggcagaatcagcctgtgcgctgatcttcttcttgtatgcactcacggtgccgtcaaacttgtgaacagtaccgccgtcgcaaacccagagactagtgcagacattctgcaacatggtgacatcgtgggaaaccatcaccacacctccctcgaacgcccggagtgcatccgacagagcatccataccctcgatatccaagtgattggaaggctcgtcaagaacaaggatatggggattggtcaaggacaagcaagcaaatgcgacacgagatttctgacctccggacagtaattccatacgttggagaccagttgtaccagtgataccaaatctataatatgaaattagtcaatgcagtacatgcgagtggtcaggataaacttacgctcccaggtgtcgtcggtactcctcgtcggttttaccgggatatgtcttggtcatgaagccgactgcactggcattcatgtccaaagcatcgacgtgatgttgggcgaagaatccgatgcgcagtctcgagtttgtggagatgataccgcttgttggctcaagctggttggtgagtagtttcaggactgtggtcttaccagcaccgttaggtccgacaattccaatacgcgaatcaagttgaacatccagatcgacatccctgagaagaggtttgtccttggtgtagccgaagcaaacatcagacatctggacaatgggtggtgaaagcttctcgactccagggaaggcaaagtgaacggtgtactcggcctctggggcttcgagaactggcatgcgctcaagtttcttaattctcgactgtgcctcggaggacttcgcggcgttgtatcggaacttatcaatgaatgctgatgacgatcgttaacacagctacgacaagatggagggggtaacgaaccttgcaagtgagctctttcgcccaactgcttctcgtattcacgcttagcagtcttccggcgctcctccttggtagcgtagaaggattctgcagattgttagaacaattcatagtcttgagatctgatgtaacttaccgaagttagcacctctgtagtagtccaacctctcagagtgctggtggataatatccgtggcgacttcgttcaagaatgcacgatcgtgagaaaccacaaggactgtgctagggtatccctgaaggtaattggaaaggaaagtaattgacggaacgtccaacatgttagacggttctgtgaaatgtcagtaggccgcttgtagaatagagagcagtggtaaataccgtcaagcaaaagcaaatcgggctcgcagaatagagctcgtgcaagagacaaacgcattctccaacctccggagaaggtcttggtggcgtactgctggcgctcttgggagaaaccaagaccagccaagatactagccgcacgagattcagccttatcagactccatttctgagagctttccataaatatcgctcaaggtgatatccaggccctcgcgctcctcgtcaagtctagcagcatcctttgaagtatccgccaatgaagacctttcttcttcgatggctgcaagttgttttgagattttctgtagtcgttagcaatatgccgctgtgacatcttgggacttgactaaccgcttgctcggataggagatgtttccgccacacatcagcatccaacactgcttgcaaagctggtgtatcatcaccagtaatctaggatagaaagtcagtaagagaaaaggcaaccgagctggatttgaacatacctcttgctcaacgtgaagaatagaaacgtgagtcggaatcgggatttctctgcgactcaaagcacgtaaaagtgtagatttaccgataccgttctgaccaacaagaccgtaacgacgaccataagcgagtgtgaaggcagcgtctgtcaaaatgcgcaggccactaatcgagatatcgatgttatccaacttgatatccttgctcttggcctgggagtccgagcccaattgaagagggttgacagccatgaagaactcctcgtaggacatagcctcgtctggctggttgagcagacgggacgcctcgtaggtaacgttcttcatggacttcttgtcctgcttggcgcgaatcttgcgctcggccttctcgagcttcttcttgtccaccttggactccatctttcgagcattggcagattccaagtcgacagtgtttccagtcagacccagtgtagaagacatgttccgctgcgcaccgacactgatagtctgatcaagctttttagccttgaagggcatttgcctccgctccggatctccatcggaagagctcagcgtcgtaatgaactttgcaactaagttgccgatcgcttcgtagttttgcggggagaaatctcccgaagcggagactaggaggttggtcacggattcggcggcctctgccaagggcgactcggcactggcatcgtcgacgtagaggtttgcggcatgagtcaggtagccctgtcaaatagtcagcttcaactcacaatccttcaccgcgcatatgtgcggagagacgtaccactgagtattcggtgatgatgttgtcgatgccagggatctgggattggagttcggactccatattgccaggctcgaaaggacgtattccacgccgggattcggggagcttcgaggtcaaggttttgtggagttctacaattgatgtccccaccgtgaatagtggcggatttttgtatgtgttatcgataagatcacatgatatgagtgtttatcgttcataatatcctcggaaagcttcttatgttaattgtctcttgagataatgtgacagatattgaatgctaagtagtgtaaatcatattcctagctttgagaaacaccaaaacaaatgagaggcagctaggtagtgatttctcatatatttgcgactactacactccataactaccgaaatataagcgatttccataacctcaacaaagaactttatgaccatagctttgtttcgaagtacttgatattcgaagcaagctgtcgaaaactcaatctagacaaaaatgagattgaaagtagtttgctggctgtatatcgccaatcttcgcatgaagctgttgaatacgaggatccatctatattattagcatcagattcccagccaattagttgattgagcacagatactgtagccaagttcagaatgacctcttggcatttgtgatatacttgcatacgggaaacaagcatcagatcacccgaatgtcacacagccccaatatttgaagtccttaagcgatagacaaagtacagagtagacgtagcatacgggcgagtagcataatgatcagcttagctcctgcggcctctccggtcacgttatgagcaatacgaggttttgcgatgatggacataagtaaggttcagatctgaccctgttgcccaaagatgtttcggctactctgtgcagctaagagcgatagacatagacggtgaagtggaagatatggcctgactagattactctgcatcaatgactggactctgatgaaattacttaaattagatggctcttgcaggcaggttgtaggtgtttcataagcagtttcacgttcggagaaactgcattggaccaatgagcagtaggtgaattatgaacaacgcagaggtatcggttacttaattaacaatcaactgcccaatgaacctatacaagcttagaatctggaagctgttcaaaacgcaatttccacccttcaccaaggtcggaaattgcaaagcacgggcgtgcaaaatcggccgagggtcggaaggccgagaattgatgtcaccagggctagaggtgaatggcatctttgtttattatgtgattcttttccaacaatggtcagaaatggccattcgacctggatatttcaagatcaccaacagtgcagggaatatcttgttccggtctgcaggtcgctgcagccaacactgatataacgggtgacgacaggtgagaaaaacaaattaaagtattgggtcatagttacttatgaacagttgacacgggatatgtaaacgtaaatcaaggaactgtccggatggacgctccatatatcgaccttcctaagtgaatgattggatctgccgatcgctagaagttcaggtattatgtagggatcggcctgaaccgcctttcaggtgaaaaaaaaagagagttaaagagcttgaacacgaggtacttcttcccccgctatttgagacactattgacggttaactgccagagctagaagtatgagtttggaattaggaattgtgcttcatcaggttcctttgatctgcaaaggggaaaagagagaaaaggggacttttatatatagtaatgtccccaaaaacaatagcaccgggtactatatcgggttaatttataaaatcgaacaggtcaactcttgaacctaagatcgtactctaatcttcggaccaaattcggaattccaggatcacgctcttcaatatagcaatttaaaggtacggggtacctgctggagcccttgcattattgaacctcctcgcaacgctttcagtccattctttgtcggatatttaattccagaagcaaagtcagcaaagtcagcaaagttagtaaagttggttggaagtggatctggatggtgacaaaccagcttttcactcggcacaaagtataggatgacagcttaaccgagttgatagtggatagattcctgaacaaagcctaaccgatcatcctttgatccattgttaatctcaatggaccatggttcagtattagagaacggaacacctgcgggctattcatagccagtggacaccgatcggcttgagggccccttcacgatgcgactaacgatcctaggctagggggccgagaacgcaatctcagccagccaacaccagatgtgtggggaattctggatcgcatggctttttttggggcctagtggcttctccatttccctgctctttagggtgctcggccagtcgaagcggacttctccggttgcttgaaatgtctggactatgacgccaatacaaatgtgagccgcaagggacgtctgccaaattggcgcatcctcctctggcctgcattctgcatttgcaacacctgcaggatcgtgcaccagagctagtaccgtttcgtgctgccctgaagtgctgtgcaaatcggggtattcctctcctgtctgtagaatgtctggtttgttttgatagcagaatcttccctagatcttcgatccccggtgaaatctttaaatgaatgccatccaaagacagcgacctacttcataattgatctaagatcaaataaatcacaaaaggacccaaggagggggagttattgaaagttgctcctagcgtgcgcagggcgggagttgataatccccgtgtgttgttgttgatttccccgggtcacatccacttcgtctggtgttctccttctttactcggcctcccagggggtagaggcatattatttttcttggaggctttgctcggcgttggccattcactctttattttttaattctttttcctttgctttgtctggaacgtcaatcgcggcctgggtgaggcagcgcagcacttcttcatcaccacccggcttgcgcaactcgcaattcgccattcgacctttcatctacctcttcatcgtttgcctccatactcttttgtattgtgcatccatctggaatgtcattcacggagcttatcaacctggagctgatcgtcggggtgtttgacatccttagcggcgtcctctgaggatggatcacatctcaactgtaagtccccgagttgatatcactttgcaggacggcggcctggtcgcttcggaaccttcactaactagcatttttagctctgtgcattgagcacagttggaatagctcccaccggtcttgcgctcggtcgcgccgaacggactcagaggcctgggctctttcggcgaaagactctctttcaggatatcctcgagccgctccctaataacagtgaacagacagcagtcgcccggcccaaaaccgctctctcatcccgcagtccggccgccgagtggcttgccgcaaaggaacaggaaagcttgcagggaaaccaagaatccaatctgcgaaaagcgcccttgtcgttcagcggtgcaagacgccgccgtcggggtcaaactctcacaaacccacccctgcggattccggaaaatgagtcgactgactcgccggtcgaaatacaaactcagcggccatcctctggttggctgcggcggctgtcgatggcctcgttccaagctgaaaccccgactgcaggtagtccaacaacgccctcgttcaatgggtcagaaagcccactcgttcctcgctcgccctatctgcgaagaaccccaaacaaattggtgaagcgaccggcttcgcaacatacaaatacgcatgctctctgcatgaaccccatctctgaaccgtcgccggctgcgctgcgcaggcccgccactagtcaccagaggtcggagtcgatgttcctccggacttcctctacaacggacttcaatgcatactttccgaagacgcctgtcgaaggtccagcaatcgaagaattcgagctcgaaaagaagaagcactggatgccattcttcgttcccaaagctgggaaattagcagagaggctttcgcgcaggttctcgacctccactgccccaaaggttcagagtgtacgccaaattgcgtctgacaatggcgctcttcctgtgttggttgcggctaatatgatctcccccacggctgctgcgccagaagacatatcagtacctaataccccaatcgaattccgcaatccgttccaaatgcctatctccgagccaactcccaaggagtcggtcgccccggaacagcaaacagcgaaatccggccataaacagtcatactcggttaacgatattgagccgaaaatcatcatggcaaacacagtcactgcccacgggacaccgattatgggacccgttcgcggcggctctctgaagcgagtgaagggaaggaccttttcgatccctgcctccgagctctcaatggaagagcagaatgtccctattccgaactcctcggagccggagccgcggcgcaacatcactgatccaagcgtgtttcgtgccccctatcccacttcgcaatctggttgggctgactcggctttggaaagacggtctcaggttggtccccgatcggtgtcgcaggactacagcgttggcttgggacctcgggccggtgcacgtcaaatgacctcggatgcggtcgccctgtcggcctggcagcaggcatctcgtcctggtggtcgacctcatggttcccttcgtcgccgtccgaagggattttcgatttcatgttccgatccggcttccaccgtcattggctccgatgacactcaggtgtttacatcgtgcgatggatatgagacggactttatttcagactattgggactctgtccgcacacgtgaaaccaatcgcagtggactgaagggactgcggattgagacgatgtttgacaaggcaggtacaagcttggtgaatgaagaagccacgaccttggagtctctcctcccgcggggctccttcgccgctcggtcttcggacaaggatccccaattattcactgatccgcttctgtcgtcccctcctttggttcaaacatccatggttgaaactccgttcgtggctgacgatgatgctttcagcatgattggagcgcttccgagcaatgatcgtgattgtttttcatcttctctgacctattcattggcgaaattagcagagcagcccgactcgggcactggtgcagctaaggatatgtctgaatcggtgggtgacttggagtcggatgtcaacaagaaaacaaacatctttgactggtcggaacacgcgcaccatacccgcgaaacttcagactctgaggcgcgtcctaagactatgcagggaaaacaagagggggttgttgataggagccgggctgtttgccggaaagcaccatccactgtccaccttaggagccagagtgtccctgtcgccagtgaacttcccatcaacgaatcacgtcaaacttctggcaagtttggtacttggggattgggaactaaaggtgtgagtgaagattgggacagcgattttgatttcgacgaggcggaggacacaccagtcgccgaagacaaaccacttgttgagcccgatatcaatcgccagagcatgactgttcccaaggccattctggagcgtcaagcaagtcttcgtggtcaatttgggcaggttcaggaattaaccatgctggtggaggaattgaaacgtcttcggcatcaggcaaatgtcctccgaattgtcaacggacctgccagtgaattgtgggcagaagcagagcagatcgtgaaccttgctaccattgatgatgatgaagctcgtcgctcgccaccagggtctcctcaatcccttactttcagttttgatgaatctgacgatgatggccttaatgggtcgtccaagcggaacagcgaagtctcctgggacgtgcccagtggtgaaaacaaagccatcttgcccctcgctcagctcgtaaaggactcccaaaagtccaaatctgttcttgatatcctccagcctcgtggtcaggagcccgctttaggtcttgacgggtcagaattggcatcacgcggaaagaaacttccgtttgatacttcctcgttgaagaatttggtggttcgtgcgggtgtggtgacgcgggcgttgaaggaagttattcgcaaagccgacggggtggcagacagccctcaggacttccaagacccgccattccgacgcattttcgacaaaccatcccacgatgatattgccagctttgaggcagcgctggctgacatgtcctaatcaacttttcttatcttttccccaccacatctcaatactcactccctctcatcatcttctatccgccaaccacaaccatgagacgaaccgaaaaacacctcaagatcatttggatgaccatcttctccatccctacctaatgtttacacctgcatgatctcggagaattccgtccatttctttcacagtgcgatctgactcaaaacgccattaccctttttccattctcgtgtacaactcttccccaatgtacattgccaagaatccggttttccctttcccaccctttcatgtgtgcatgccacatacgagtgcccattgggcccatgaccattctctcttgcgtcatcttccccttcctttcgtccatgttccatatttgcgcagctcatatttcctaattgcgctgtatcactcacggaggatcccttctacgggatgatcctggtgttttcgaacgaagatccccatatcaggcaagatgaaaagcgatgaacttcagacgcgatgattaacccggggacgagcccggaggacaaatctatgaactttcaatcctgtgcctaagcctaatacagaaatgaaacaaaccttctaatctcatggtccggattaagcaatcctgaagtaaatctacaagagaccaccgtcctggacagtatagaggagtggtgtctaaccccaagaagctttcgggcagctattgatactcggtgccagtcgctttgaaatgtggtttgggaaatatatactgatgtccagataagtcgagggttgcttccttagacaattggactctccacgagtcatcttcaatttctacagtatatattgaactttgaataaataaggaacaggtatatcttccagttacttatcaataaggtccgaagccagatattgatgtgcaagaacagacgaatcctcgctctgctcaacggttggagctgatatatagatacaagtataaaattatgataagatttcagtctagaacgcagcggccatcatttctctacagtatataaattaagtatccgactagctccgaagttatttagctctatctgatgagttcaatagaggcgttttgtggctgtacaagccctgcgcatcacctgggcggacaagataaacaccattagagtaagacgtagtatagttaatccgagtattatccggggcactaggaaatgaaggggccacaccggtgttccatgttgaggagatcagattcggcttgtattgatctattggtgatcaattgaggtcttggatgtatggagtatgtacacattaagcattagccaatgtcgatgtccttggcatagcctcataggaacatatggagtatagaaagaaaagaagaaaaagaaaaaacggaaaagagaaaacccctgccttacatgagcgatacacgtcaatacgcctggacggcggtaataaaacccaaatacagccactcgtacgttacccaccaggccactttccggttcaggggcagcccgtcgctgattggctgacgagatagcgggttcctctatcttgagctgcgctactcgcctggtccccccaaggcgtgtcttaccctcaccttgcttggtgcagtcggcctcgcatgggggagtatcaacaaatagatgaaaaaggcgaatgatgaacagagcagaataaacacagatccaaaccgagacaaaaacaatggccaaaaaacagggtgttctaaattaagactcaggggcgagatgcggagatgaagtacctgtacaatacaacaagtctcctgtataatattggccgctagtccgctattctagaactcaactcttctctccttctcctcttctctttctctctttatccgacattcattcccttttggctgctggccgccgctcttttcgaggaccccccgtcctacacactctttttttacattgaccttatattgcttgtgacactcttttttaccagctattccgtgattttgcaattgtgtggcccccattttaaatgacgagcattaatctcgaccggctatcgcctttttaaacgtgttgaccggtcctcacgttcccaagtcgggtctattcctatagaccagactacaccaaccatgtctcatgccggccacgcccgcctggcgatgcggaatcacgttcgtcgggatgtcatcccttcacatcgattgccattcctggtccccactacctcctcgatacctaccaagctttcatccatcgtggctagatccgaatcagctgagccgacttcaggagtaaagcctaccagcgacctgaccacgacggtcttgccggttgtgctcggtgctggtatccctattttgtgcgctattattatcctcattgtgctgcaccggagacatgtcaagaaacttatgcgggaagatgcaatggataaacataaatctctcgattttggaatggatacagtggggcctgccaccagcaggaaaggaatgccccagatgtcagaacccactcataccaaaggattgtctcttgatgtcggtccatatctgttgcctccgggcctggaaggttccccggattcgctacgctccttgtcaatagacgatgacaagtaccgtccggctactgcttctattcggtcgtaccccagaaactcccgattcgagggttctgatgacggcaattcaggtcttctccaaaatgcacagaggatgtctcgttcatccccgccgctgtatccccccagttccccgaacccgcgcaatgaccgcctggggcaagtccccggagtgacacgtccgcctgctgcacagcaacccggcatggccaagggaagtcccaatgccagccggattcccacgccagatcccctgccccatctggatgcctcctcgggtctagactttggactgggcgatacatacggcaattcctatagcgctccgcatgaagatcgcccgaacttcccgctgcccgattcttcgcaaccacgagcattgacccatgatcagggtcttgcaccacagcttcctcgtatttccctgccggccagtgatgttagtgactatggtgatgacaagtcgcaatacaatgttccttcggtcaacattcatggcgcagaagatgtcacgcatagtgccccaagccacgataaccaacatccagaacttccagaggaccctcctaatctggatacgccatatgatagacaccgcgatacccgccggatgactctcggtttgcgcccgttgcccccagaggacccctccgacaacccagaacagcgtgccaatcggattcgttcgttctacaaggagtacttcgatgagagcaagggtccggaggccacatactctgaggacttcgggccggagttctacgaggatggtaatcatggggctggcttcatatacgacccaaccactggcgactactacgatgccgctcatgccgctccattcgctgagccgatcacccgtcgcgcgatgacaccaccgcctcgagcacctccccgcttccaaggagccgccgctcggcaccaggccaccaactctgcgggccaaaatggcatgcccagcccacgcgccttctcgtctgcctctggccgtatgcccccacgcggtcccaagaaagcaattccccctccctcaccgctacacatccttcctactcctcacatgttgacggacgactccctcttgactgccatggaattcgcgccggccaatggaatcaaagaacgccgcgcgggtcgccctgagacccccagcggtggcttacgcccgtaccagcccggcccgcgtgcgcacaccccactggcctctgcgttcgacgagctcatcgtgatgcccagcccgcacgccctgcgcaagtccggtacgttcaccaatctggactttgtgcccccgcctcgcttcaagaacgagagtggtaccggcagcgatgccggtagtatccgcagtgctcggtctgcagtctctgctaccctccagcaaaatatccgcgcgggcacgtaccgtgtcagtcgtctgcctgcggaagccgtcggcaccaaggatgacatgatggccagtctgcgtccgaagtgggacatgaacaacgcataaggaagcggcggtaccgctttccactgtgatgactttgttgtcttggtataagagcacgtgatgatttgatttgatttttttttgttcatctgggtcccccggtgcttgagcttttgggggggtgatggagcgcccctttttatattcattactccattctcctttttttgtctggacatctactatcaatggcgtaaatagacgatggttggattctgatcaatttgaaatttctttcttcggtctggggtgtatatatgtgtatagttctagaacattaatgtgctcagatctggagtataacatacaacatacgaatccgcttcgattcgtccgagggcactgtgtccacaattatgcgtccgactacgtacaacgggaagtcgcgcgagttggcagaaatcgggccgagcgctaatccaccaagtcaggggctagatgggagagatcacagcattttatttacggggcctaatagaatcgtatttaacgggctagccacagaaaacaagattatccacgccgatcgtcttttttctttttcccttctcgtcctagtagacagaagatgtgtacaatatagttacatgtcagtatagtattgttcaacaccgttgaagaagtggagataatcagagtcagtggcaactgagtacattgtgcatcatgactcttttatacaacataccacacacgccctcagtggaagattcttccgtccccataaccttgggattcggtccttgcttcagggcttatacccacgggtacgctcatctcggttggaggtttcggtaccgaagaatcaatacgtccacggctggtagtaaatattggcaaataggtattattctgggatttctgttgtgaatattagaggcatgaaaggtgttagaggtataatagagtctcacagagtacacacagtaccacggaggattattctatagcaccagagactccatatggtcaggggctcacatggccgcatcaagggattgccagaaacagcatcgtgtttgggatgtaactgcaactcgactgtagcataaccagatttaacgatcatgctgtttctacttcgattcagcagagcacaagtatctattaatacaactaggaatgcggatacgccgcaatcgtaagaaatctaacaaatctccacttcccacttcaatctcactctcccacaccacttttctcctcccatggctgctagattcggcctcgagagactgtgagtattcgttcttctctcttttccatccttcatcttcattttcctttctcttcttttttttctattcccgtccgttcgtgagatatcgtcggttttcccctgaagactccgaccatagcctcaagtctctccttacgcgttcaaatcgcagtctctcattaaaccagtctattaactcggattcaattcgtgatccctcagtcacattcagtccgaaattctttccgcacccggaagtgtccacaatctctcaaaactcgccgaacggtctcccggctcaggatcgcttcgatctttaccaccgccaactcaatctcaccgttgattatcattgaccagtattgctattgagatggcgacttcagtatccaagggcgctgccgctgtcgctacagccatcggttctaccgccgcggacaccgctgtacagacttcggcggctgctgagacaaccagtgagacatctgccgctcaacccacgacctcttcagccgatccgacgacttcggctgtcgaaacgacaacttcgtccacggctgctcccaccacttcgactgaacccaccactagtactacgagcagtactacgagcacgactagtagcacgtccacgccggagccgactacgtcgactcccgagcctaccacgtcgaccactacgtcgaccccggatcccaccacgtcgaccacccagcctgtgactacttcgtccacttcgactacttcttccacttcttctaccacaaccgccccgaccacctccatagctcccgagacgacaacgttctcatccacacagggaactaccgtagttattatcacgtccactcaattagcgcccaccgccgataccacgtctatcacctcttccagcgcaaccgactcggccgcgctctctacctccaccgcagcagctagctccggtggtctttctcccagcggcacaatcgctgtcgcagtcgtggtcccggttgtctcggtggcattgatcatcctggccctactcttcttctggcgtaagcgtaaggcgaacaaggcggccgaggaggagcgccgcaaggaagtagaggagtacggattcaaccccaacaacccgaacaacgacccaacccttcccggtatggcaggcacggtggtgcccaaggacaacgaatcctccggctaccgcggctggggaactacttctgccgggcgcaaggcgtccaccaacctctccagtggaatgggtggcctggccatgtcggaaggcagcagcccgggctaccaccacggcgcaacacctagcgatggcactgtgcaatattccgatggaacccggcccgactctggagagatcgtcgaacctctcggtgtgctaggcgccgccccagtggctgccaacaaccggaataatggcgatatccaccgcggcccctccaacgcatcttccgcgtactccgcagccaaccgatccgacgcatcggaagaaagtcacatgtccgctgtccacccctcagctggctactacggtgagaacccgtactacggcgacatcaacacgcacggggcatacggcggggacgactaccagcctgtgatccgtgacgtccaagcacgccgcaatacccgcattgaaaacccgggcgtctatccacgacagggcaatgccggtatcgcgcagaacttctgatggctcgactgattcggatttcctatactctttgatctccaaaaagctcggcattccatttggcattccattttttgtgtgcttgttttgatttttgatttttttttaaccttgcacaataccacacgctctttctctctcacccaccgccgacttcattcgttttatcgggtctctcatgttccaattcccggcgcgatggaccttcacttcatgtcactattgtccctctacacttttattttcttttcccctctttctgtcccccttaatcggcctgtcgggctttgatttggtttggtcatttgtttgatatatcccgcgcatctggtctcagctgcatagcttgttttttcgttttctgttaacacccggttttatgtctgtgttgatttgttgttttattgtggagctgcatcttgtacatttcctgctgcgtgtggagttttccatgcacctggacatactcgagatttgcaatgataccttgggtatcctggatttagtcccagttcccttgtctgaaatgaacggtttaccatgagttctggtatagttactcggagagtgccggcagaatcgtaaaagaacagcgaataatcagctaacttttactaaatacaccctaaacagcccaaccgagtcaaatggactctaattatggctaattagagtagtcattactaaaaattatgcatataataaacgtactcggtccccttccgttgcagtggtcaccagtaggttcacaacgtgcctccgctgttcgcggtgattggcgctggatgattcacacagctctccactccccggcttaattgcacctcgcagcttttcccttctctcgcgagactcgaactatagagaatctcctaacacgttctcgtccctgggccctgtacttgtccgtcggtctgccccgctatctctctatcgccctctatctctattaccgcttctaccttagaccctctgcgctccctcaatccttagcatctaatcccagttccttcatcatatatgggcgaaaacccatcgcaacgcaacgtcacacattttatcgacttgtgtcactctcttacctgtcccactattatttccttccccactgtgataacccattaactgcccctcttgcctccgaagccgaaccagctttggttcgtgtccttgtcctcccaccctcttttacttttttttcccttccccaatcccaatcccaattgtttcctttcctttgcattctactctacctcgcatagtcaaccagctccgattcttatagctctcggctccgtttcgctgagcttgcgctacggttgcgatctcggtctccagagctcgggagagctaaagctctctccgagagtgtgcacacaacatgtacgtatgcctggcagctcctgttgccggttgaaacattcctcgagctactgctgatacgccttgattgcataggaagttcggcaagcagatccagcgcaggcagctagatcttcctgaatatgccgccagctttgttaactacaaggcgctgaagaaggttggttgaacgtcctgtctgcttgcgggaatatggatctgagcaggactaattcctatacagttgatcaagcaactcagtgctaccccgactatcccggcacagagaacagccgaggagattgctagagctaatgccgacccccaaggcgcgttgcgcgcgaataaggaggttttcttcttccgtttggtaggtttgggatactttcctgtatggatggtatgtacttactatgatgtaggaacgagagattgagaaggtcaacactttctacctccagaaagaatcagaggtatggccatttattatatatccagtgcacagtcacccccctccggaggctcatccgatcccttttagttttccctgcgcctacggacgttggtcgacaagaagcgggtcactcaatcccgggcgatctcgaattctaaagctccgtcgaatttcgcggctatgtttgaaggcttccagcaattcgatggcgacctgaataaactgcagcagttcgttgagatcaacgagacggccatgtctaaaatcctcaagaagtgggacaaaacctccaagtctcgtatgaaggagctgtatctacatcgggctgtggaagtgcaaccatgcttcaatcgggaagttcttcgagacctcgctgacagagctactaccgcgcgactggaattggaggcttgggccgagggcgagaacattcaatatgacgcatcacgtccattggaccgtaccgcacccttaggctctgaagaggatgaaatggacaaccaggtcttgcagtctgcctccgctggaaatctgcaaaacctacgtgaatggctggccaggttacagcagttgccggacgcccgtgagcgcgcaacccgtacgttcctgaccgccatcaacgggttctcggatgatgtgctcgctctgctactggagagtcaactggttgacatacacgccgaggacgacatcaacgaacgaaactgccttcacgaagccgccatctcgggccgattatttgtcttccacgccggtctccgcgcaggcgttgatttcgcccgcgccgatgtctatggtcgaatccctctccactacgcatgcatgcacggccgcgtggatatggtgcgacatcttctcgcagccggtccgcaaaccgtcgacattatggaccatgacaacttcacccctctaatccacagcattgtaaagggccagctggaatgcgccgagcaggttctgcttagcaatgcccgcgtcgacccggagcccgagtcgcctcttctgaccggaatggataatcgtcctttgaagggtccggatcatattcctttgaatctcgcctgccaacacggctctctgcctatcgcgaagatgcttcttgagcgaaatgcgcagttgctgccggatgcagagggtctctacccgcagcatatggttgcacgtgcctcacaatcgccagacctactactactgctaaaggagcacggtgctgatctcgaccagaaagacaagctttatcagtggactccgctgttccacgcagctagcgaaggctgcgtcccctgcctacgtaccctcctcgagtgcggggttgatgcccaggttgtagatgaaaagggcctctcgtctatgtactatgctgcctgggaaggacatctagagtgcatgctccttctctgggcccagccctccaagaaaaaacccgcgctgggacctcttgatattctcaatggcgtgcggatgcatgaacctggtctgggcgacccgctgtctgtgactgcgagcgtctctgaattggaaatgacagatggtatcccggaccttgaattgcctccccccattatccctctccgccgctatggtcacaacttcctcgacaagaaagtatttgtgcaacttctgttcgatcaaggaaatgtcgggtctgtcatctttgatcaggcgggccgtcatcctgccgctcgtatgaccatctcttccaagctgtcagatctcatccctcgtactatcatgctacccatccaggaagagacacgcacaatatcgttccacgtggataacctagacacctttgccgtggactttgagatcttccctaccttcggttcaaaggtgattgcaaagagtgtcgccctgccagacatcttccgcgccgagtcgtccagcactggctcatgctgtctgcctctattcgacccccggctgcgtacaatcggccagctgcgcttcaagttccaagtgatcaagccataccccggcgatcccctggagatcacccactttgctacatactggaaggccaccagtgctcttgattcagatcataatggactggtgactggttccagtttgtcgggagattacgtccagctcttcgtacaactgacccgggaccgcgtggcagtcctttacccgcaatttacaatcaaccaccatggaatcgacattgcaatctctcatttgacgtttgcccagttccagaccattggcggagagcgcggtttcaaccctagcgagatcctcgagttcttgaaagaatcagcgacggttgacatagcgcagacccatcgactcttggcgacgtcgttcttatcgttacgcgatgtcttgcgctacatccctattgacttgaatgtcaacatctccctcatttacccatccgccgcggaggagaagaagctcgacctgacttctttggcggacgtcaacagctttgccgatgctatcctgactgatgtcttcgaccacgcccgtgtggcccgtgaaaagaatcccgagttcatgcgttccgtggtattcacctcatacaacccgaacatttgcagtgctctcaactggaaacaacccaactgtgagtctcctaatacagtccaatttgtgtgatactaactctgtgactagatcccgtccttctctgcaacgatctcggtcaaatccgggacctggctgggaacgtcaactcgatgccccttgtcaacagcagtggacgagcttcgatgtcgattaaggagtctgctcgtattgcccagagcaacaacttcatgggcctgatttgcagatcaagccttctggtatgtttgtcctatttcccgcctcttttttctctgctgaccaattagaatgtcgtccccgcgctcgtcgagactatcaaggagcttggcctcgtgcttgtggccgatacctctgatgaggtcacttcgaatcgattcgaagaactacccgctcctgatactatgggcgttgccgaatgggcttaccgcatgcccgacggtgttaacggtgtgatgagaggcaacggcattctgagatttaacgatatgatcgatatgtgatccgatttacctctacgcaccttttacatacgatacgtcgaaatttaatttctcaacgaagattacgagctttagtagccgccagaattgcttttttttttcctatcttactcttggctatttatttcacagcagagatggtcccgcgcgtgcgaccttctctttattgcgttctaggcttgttcatttcctagtcatcttgggcgctggagatagggctggcgtttttatctgggtttggctttgtcgactacatgtagtgagatcgtctagagagcaagagcaagagcatttgagagttttgaaggcaaagaaagactgccgtattagagagctgaatggctaataatgtacaatggaccgaatcccaggccctagtatctcccgctatgctacttacttactgtataatcaatcacatccccttcacttcacttcacgtactcttaggctttctcttcccaatatcccatccccacctccgcagcgtcttcacaaccttgggcgtgacagccgccgtcaaaggcacgcgaatgaagataaagctcttgtgaatcgcataagcgaaaaccaactgcgtccagatacctgcgtgaacacaaaccaatcagtcagaacatcactctcatcactcaaacctcaaagccctaaaccaaaacagaaacaaacttactagcttcctcctgattccgctcctcagcctgagcaagctgtccctgcccatcctcctcctccgaccccttcgtcttcggaaacacactcttaactttatccttcacatacccaataacaacatgctcatagtacccaatacgatcaacaccaagcaaccgcacagccgcaaaacaaaatgggaaatccagcgccgacaggccaagatacacgcccagcgcagcccatccgtactcgcgcgagagagacttcagacgctgggatagtgaaggtttcggtttagttttgccgccgcctctggacccagttccatttccaggtccagagtcagatccagagctagagttcttgccatcaccagcagacccggagttgaatcggcgctgcttgggcttgggctggaatgagctcggtgtcggtgtcgggcgggtgcgcgtcgagaagcgcgctgttacttgtgctccgtgcgcgtgcgggaagatcgtgctccggcgtgcgagggatggacgaattgaggggttgaggtggagctggagatgtgaagctaagcttggggatgatttgagcatcgagctagggcgcgagatccattttgcgaggagggttgggcggacggacatggtcggatgggttttggtagccccgttggttttggtgagggtgttgtgtgattccgggagcgaattggggttgagaatggagcggtcatggaatgctggatgggagggtttttttgtgtttctcggcgttttcggcttccggtccgatcgggcttgcggctctgtatgccggagttagggattaaggcggtttggtggttgtagataggatgggatattgtagatgggtgttaggatttctatcgacttttttctttttgttaaaagaccttggtattagctaactatgtcttaacgcgtggggagattgccagcttggatttgtatacttcagggcggcgtgcatatcgctgactaagcccaacaccaaaaacttcccgagtttctcagccacgacgagcacctcaatactcaaacccctcccaatatcaaacccaccatgtcgccgcgcttaggagggctacttcagctctcgcccgtatggacgagctcattgatcacgccccggatccccatgcggtcattcggaatccgatctctcaacccgcccaagcccagtcggttcaacatcgggcccggactaccagtcctcgagtcgacgtcgacagcggctctcctccgcaaggcctattccctgcccctccgcaccggcgccatcggcatcaagaagggcatgacggccatctacgatccggagtctggaaagcgcatcccctgcactgtcctgcagctggatcgtgtggaggtgctctcccacaagacccgcgagcgacacgggtactatgcggtgcaggtcggtgccggctggaagcacccgaataacgtgaccaaggctatgctgggtcatttctcggttaatgggctctcgccgaagcgccatatctttgagttccgcgtcaaggacgaggcaggccttctccctgttgggcagagtattgaggctggttggttccaggagggccagtttgtggatgctcgctctaataccaagggtaagggctttgcgggtgtcatgaagagacatgggttccatggtcaggatcgcagtcacggtgttagtttgacgcatcgttcgatgggttcttcgggtcctggtcagggcggtggttcccgtgtttaccccggaaagaagatggctggaaacatgggaaataatcagaacactgtgcagaacttgaagattctcaaggtggattctgagaatggtatcgtggttgtcagcggtatgtgattagagatgctctgacctctcgaagtcaattttgctaacttatatttttcaggcgccgtcagtggtcctaagggctgtgttgtgagaatccaggatgccgtcaagaagccatggccggaagtgccacaggcaaagtcggctgaacctgccacggaacctgctactgcttaattggagatttttcttagttctgaccatgtactattacaccatacgcgcgatattgtttgacttgagcggcgtttgtatatgatacaaaaatgatatcctttcttttttctcttagccattgagaaaaaaccagtggcttcgccaagttgataacgcaacaaatggtcccataaagaatgaccctaaacgcccgagccaatgcactgctgtatctgtacactctctccccgatattcgccccgatcttcagttcttccggaagggatcgctatcactgtcaagcaattgaaccacctttccatcctcagtctccagactccattcctcagtacggaactagaagagaaaacaaaacaaatcagcacttatcacaaccataaaaaaaataaatcaaaaactcacatagctcatacgatccggccgaatgcttcggaacctcatcttgccctgggacttagtccccttaacccaaaacgagatattaatgcgcccatgcaattgattcatctcgccactaatccacggaatctgctgcgcaaagtagatctcgtcgccgaggatctcacgagcccgcggcgacgtccgcagcgcatacagcgtgctgttcacgatgctcgacgacgacttctggtaattgaagatgcccagcatgcccgctccagtcgtaaggatgaagatcgggagtgtatacagccacttccggccaggcttcgggttcgggagctcgcggtctgcacggcgttctagcagtgggccggcgttcgggcctggcgcggcgatcattgtgcggcggctggctggcttggggcgggcggtttgccgggcgagcgcggcgcgccgcgtgaatgctcgggagaagaacattgtggtgttttggagggtttgtttggttgttttgtcgggctggttggggttggggggtggagaggttgcggaagaaaatagtgttcaaacaagacaaacagatcgggcggtttcgacgtcactgcaccgccaacggatgagattacaacgctgctttgagatttagagaaatggctgcggtgagattgcgcaaggcgtttcggtaccctgaggaatcggagggcgaacgagaggagttggatgaagaggaacaggaacgcgtcatcgagcagctgcagagccagaatgatgctcggaatgcccagtacagtgtacatatctttctttcttctatattcgagaatccacgctgaacatgtttccaggtgatcttcactgcacttccactgctggctgcgacagtatttgtgccttcggtgctgtcagcttccagtcaggctgaacgattgttctcgctcctcggtctagtctcgttgttgacaacggcgtatatcatgaaacgctctcctctccagcctgatcgcaaaggcaagaaacctatgacattccacaccgaacgtattgctcggatccatgggactctggtacctggcaatagtgcgctttgcttgttgctggctttggtctctctttctacaggatcatcttatgcgatccgaccagtactgtacttgattcctggaggtaagtctgctctttcttcgctggggtatctactctgaccttgtacagccatgctcgtagtgattctactcgctcgaaaggtcatgctctctgttgaccttgcatccctcaaggatctacagtacgagtataaaggtgcctagccagaaattcaatccaacttgaatacatatatgttcactattagtacagccagattttttttaaaccatgttgtcgcagaagagataaacccttcggggaatcacaaataatacatccgatttccttaatcaaacaccattttgcaaatattcagtgttcatatcccacttttaatccttctgtatcatcttgcgcatgtaatctctgttgtatgctcaaatccggaaaatacagcaacgttcatggccgtttcaagtgcttacggtctcaacagagtcctggatcaccaacgatgggtcaacggggattcccccgtagtcctcataaaggaccagtagattctcatcgtcctcgttctcatcgtttccgtccccattcggtaccggctggtcgaatgggctggactcgaagctgaagccctggtcctcgagggtcttatgtcgttccagttcggcttcctcagcttccttctggcgtttttggatgcgtccatgaacatcatcaccaaatttcttcaaccaccaaagattcgatttccggaaatccaccaaggtctcgatactgcggggatcggcaaccttactagtgtcatggcccagaatggtacagttaggctcatacggtttcatcgaagggtcacgctggcaagcagcgcaactgcattctttacgacattttggacagagccagtgatgtttttccatcgcctcctgtggggagatttcaaacgcgcggaacaaactgccgtaacagtaacgctggtcacagtttgagcatggagcgagtttccagctaacttcaaaatgaagacaaacgtgacagcggccgacgtcatttgattttgccaggagagactgccgcaatttgcggcgctttttagatcgattttcgtcttcactatcagcgtcttttgtgatttttgccacggggttgggctttttagggtcattccaagggcggcgcaccagttgctcctggcagatctccgccacagactttttgcctgcctgacctcgggcgacaaggaaagtgggaaactgaaccttgaaatccttgttgttctcatcagaggaaaatatcaaccgtcgccatgtttcataacgctcggtcaagtgcttccatgtaaattgttccatccactgaaggttcgaaacacagccacagcttctacccataacgtagcaatccatgcagacatcataaggatcttcttcgccgccgagagcgtaggcacagccagaacaggtaagaaacctgttaaatatattgcaccggcagaatgagcaggtgacattgctttgaaactcgtggtactcgacattcttctctgggtttttttgtgagaatgactcagacaacaaaatattcttgtacatgctgaatagccgcttaaagtcgtcccacagttgaatcaccaccgggtggtcgatattttttgcctgccgcaacagtttggaatatcgttcgagagtgaagtaaacaatggctttattcttatattgctcatcgcggcagaccatccgcgcatgcggtaaagcttcacgcagagccagctcgagggtgtcaacgatagtgcgattccaggcaactttcattgtccgagtgccacggttccaaacctggtgtgcagcgagaggaggtacaagaataagatccccgggtttttgttccaccacccaggtcttgaatggtgcaatcttccatgcatgcaaaggagcaaagaaatcctcgatgtcaatatcgtgccctagaacagacatccagtattcggaaacaatccgccgatctttggtctctgtcatgagccatattgaagaacccggttccgttggcttgccgtattctggagacccgtcggacgcgtcgaccattatattgtgaccgagactggcacacatctcctggtgtgctggtgtgtaagtaccctcatggccaatgtagcacatcaggttctccgcacgcatgtttgggggcagactgctcatcaaatcgcccgctggggcgatgaggtcgccttggggggtcctagggatttcagccagattcgtctttcccgacgcagggccttcaaaggctttgggtgcttcgttgaggtaaaacaatgaaggaggtaacagtttctcaaggtaagcgtgccactcaggagggcagtcgatgtccttgaggtagagccgttggactactttgtctgcgtagttgtggacagttatctgccgcgtgagaagtggtaggttttcaaggtaatggcccatactgaagttctgggtcctcttttttaccagatctcgaacctcctcaactaagagaggttgcagttagaatcaaccaacgaaggttgagaagactcaagagcgtgagcttacctttcttcgcatatttttctcggagccatttttctgagaaaatctgcttatcaagatgtttatcaaatcctctgatgaccagtggttttccgctcaggacaacttggaacaggacaagcttctcaaagtctgcgagcggaaattcatcgatagagtcacaggtaatattcatcgcaaactcgaaattaggggtagattcaacaacctcacgaatgtcgagaagaggcgataggggctcgaaagccaggcgggttcgatgtgccggcatggcgagcgcaaagccccagagggggcaagatatcgacgtctagttgatgtttgtaatcggcgcgaggctcacagggaccgcttcatgatttgagggggggggggggtattggtagtcacagccgatatataggctggacaagtcttgtaatcattaaatcgttggctgaattgcgctggtctgtgttgtttctgttgtttctgttgtgcggcgtgatgatggtacgagataagagcggagtaggaaggagcagaggggcagtggttgggtatacactagctagaacagaagagtatagtatgtcaatttaagattggaagccgggaggtataaaatcagacagggtatgaaagaaagtcatgtcgttcgttccctttggttcgggtgatcaccgacttctgttggaacgcgggatgccgcgattgatggcctcaggcagagacttacacgtgaaaccttccaatgttggaagtgtcacagttatttcactattttatctatatatttccaatggaacttagctgacatagcatattatctttgcttggcttaaaggttataaaatttaacgcgttatatactcagcagtcagcatattgtgacagcgcaactccatagatctgatgccccaaataggcttaggcggagggaagccgcttctgctgcatgccgatctaatttccgacttctccagatctttgaatggccagaccttcagggcttttgggaggtatataaatattgccaattgcctgattgactcacccatgtttggtctctagatcccctaccctcgctatgctttccaccagctcccggctcttccgcgctcgactatccccatgcaggcaaaaggtcaacctcagtctgtacaatgggcgcctttccacactcgctcacaatgcccgttcttcaactcaattgaatggcagccgatctctcgctggtgcctcatctaatgccttgcaaccaacacgagtccaagcccgacacagctcccagttgcaatcgcctgcaacacaagcaatcgagacggatagtgcggagaagaacccagccactcactacaccccaccgaagacaggcctgattgcttccctgccgagttcatggataccgtatgcagaattggtgcggctggacaagcccacgggcacatactacctgttcttcccaactctcttttccacactcctcgctgcgccaatggctggtgtggcacctctccatgtcttgggcacgacggcactgttcttttccggtgcgctgatcatgcgcggtgcaggctgcgcgatcaacgacctgtgggatcgaaacctggaccctcacgtcacacgcaccaagttccgacctattgccagaggtgcactctcaccgaaaaaggcaatcctctttacaggctcacagttggtggctgggttgggcgtgcttctttcgttccctacacagtgcctgtggtatgggattcctagcttgccgatcgtggtggcctaccctcttgctaagcgcgtgaccaactacccacaagctgtgcttggtcttgccttttcatggggagctataatgggattcccagcgttgggggtagacctgcttgccaatcatgatgccttgatggctgcaggtgctctttattccagttgtatggcttggacggttttgtacgatatgatttatgcgcacatggacattaaagacgacgtcaaggctgggatcaagtcaattgccctccgccatgagcacaacaccaaggctgtcctgagtggtctggcggtgactcaggtctcactcctcgcggctgcaggagttgccgccggttgcggacctgttttcttcgtcggcagctgcggcagcgccgttgcgtcgcttggtctcatgatctggagggctcagttgaagagtgtcccgaactgctggtggtggttcaagaacggatgtctgctgaccggtggaggaatatccttgggcttgctcgccgagtacgcgacgcagtaccttggtttgtacaatacgacggagccggagcgcgtgatggccgagtcaacgcaataagcatgtaacaatatgtatatatagacatccagggcttggttccctttttcacgagttctgcaccaatcctgcgtagttttggatgacagtgacaatatctctccagtccatcatatttccggtactgacatctaggctgttctccgcgggaggcagcaaagtcacccagccttccgggtttgattcactccatccccactgatcacgtaggactttaaactgtttttcagtcactggatgtcggtacatacatctgtccatatccaaggctgcaaagatcctaggtttctggcttttgaatcccatatccactactccagtcgtgtcccaggccctaatgaccgaaagaagcaagttgtcggcgatcccattggccattttcgccatggtatttgcagacattggggcgaccagtagaatatgcgcccctattatgatgtcagttcatcgtggtatcacgtatcattcatctacatagccactgacatttgcgcagctcaatatgcagcactggtcctccgcgtgtccacgacggagaccattcatcttcgtcccggtagatagcgtccacaccatctatttgaagcagagtttcgaaagccggctgctccaagatttgtccgacgaggaacttctccgctggctcggtgactaggatacggattgagaagttcttattacgacatagcgcctctgcaatgtcaggcagcttgatagtagcggctgccagtagcacatggatcttcttgtcatttgcatactgctgggcgataaaaggcgtcggggatgttcgagaatccattgtagtagctttaattagaagggcagaaaagagagaatgactggtccatagagccctagagagctttagatgtgtgggggtcggcggaccaaccgcggattaaataatactaaacctttccccgaggcaacttgacgaacctcttctcttgtaaaccaccatcattatcaaaatgttttccagagcagttgcatcggtatgaactgttctttattctcgacatccgccattcgcatcccccagctaacatgaatctcgcaggctttccgcccggtctcgcggccaacctttttgcggcccgtccgctccgccatccgattcccctcgggccctgccattccctccgtcctccatgcacgccttctgtccaacgagacccggacggcgatcgataaggcggtctcttccgcccccgtcgtgctgtttatgaagggtacacccgagactccgcagtgtggtttctcccgcgccaccattcaaatcctgggtctgcagggtgttgatcctaagaagtttgttgctttcaacgtgctggaggatgcagagctgcgctcaggtgtgttgggattaccccgaacttcctgccggctatagattgctaatcgtgctgcatttacaggtgtcaaggaatactctgagtggcccactattccccagctatacgtcgagaaggagttcatcggtggatgtgatatcctaatgtccatgcaccaaaatggtgagcttgctaaacttttggagaccaagggcgttctggttgcggcggatgaataaataacagccgggcccgagtggaagatgtcagcctatcaatttggtagatggctgtctttgtaaaattatttgtctctaatttattttggtcctaatatcctgctggtcagatagttgttttattgatttggcaaatggaaggtaatctccaatctgtctgctccagtagaccaattgtcacaagccgccatgcaaacgacgaggtggactcttgttcaagaagtaaccccagttgatggggtttaacatcatatgtagttgatcttcattacatgattagtatttctcttaaatcgacagccagcctaatgagctgcttgagctgcttcggctgcctcttgtgctttcaccaggtcttcggcaatggctttgtccagctttgcgcgttgcctggcttcgtaagcttcacggctcttcaggatccgaccaacaatttcgccagcgttcacgtgttggaaggcatgctgctcggcttcccggaagattcccatcttcttgggagcagtgtatggatcgtatgttagcgggatgaaggtcgtgggtccatggtagacagcatcgggagtgccccacgggatggccttcagatatggttcggtaggggtaaatggtgcagagaagatgacggcattgatgtactgtggcgagggttagcaaatcgaacagacgagaggaaattaagaaagacttacgcggcattgaagaacacataggccacgttcgaagatgttcatgattgggtagttcaagcctttccagtggttgatcacatcgtcatcgtggatacctgcgacaatgtaggacggtgcatagtcctctccgtagtccttcagtctcttttcaacttgatctggctcataccagccattttttcggccctcggactcctcgagctccgtgactttgcgcaggaacgcaatgtgaccggaggaaaaaaggtcgaaccctccgtcaacataaaccaccctctgcccaggtttgggtccctttccgtcgactaatttctcgaatacaccagcttcctgaacgacgtggtccatcttcgcggtgcctgagccagtccatgtccacacctgaggcccaggctgaagaccactctcgtccgttgcgtaatccttgattctctgcaaaagatctttggcggaagcctgacgctcttcgggacttccatatccttctagtccagcaagtgtacccttcacagatttgacaaagtggttcctggtgcacaacagcatgcggccaacaagatcggttgtcgagatgcctggggtacgtttgacgacacggaagcgcccagcggctttgacgaagcggtaacagtcatttccatcactgtcggaagtaatgtcgtctccgtgtacgacgtatttgcacccgtagtgggatacccagggtaggtaggtcacatagggggcatagggaacactctgagttgcccatcgacacgcgtcaacggctgcgacactaaataacaacgacattaggaccaggaatcaacaacagtaccagcatgagaccaaaccgaccgttcttccagtgacatcactgtcgggcccttgttctcgaggatagcttcatcggagtgtattcccacgtaaagggcctttcccagctggcgagcttggagcatagcaccggcatgacctgtacaacaatccatcaattagttcacagcaatttaccaggtgttaattgccaacctaccgtggtggctgaagtcgaagcatccatcgacccaaagtcggtcctccgagattggtacatcttcctgggggtcaacaggccattgtccaggcagaggaacctgctcctcgaggggtgttgagtccattttcacaacagtactccgtaacaatttcaaaattgttccaaagtctagactgtccaggaggtggggaggggggatcgacgataaattacatacaatatagggggtacggtcacagtaatcttccgcattgcggggaactttatgtttctccgagtctcctgagtcgcaatcaccttcaaacagaacatatcaggtcttgccatactccccgaacagtctattcggtgtcgtgctctcctgggctctcgtcctctctgacagctcagcttgtccagctatagacccctcatctgcgtcgcatcgtttatttcactccgaaattgacaacaccaatgattccctctacattcgccccgagcatcacgcggcgagacacaaccaaatccggcgttggacttgaaacggcatatggcatcccacctccagttatgagcggagggggctctcttggcccgcaaagtgcaggcgcaatctatcaacacatccatgaaatggcctcgaaacggatagcgactctcgactacctgagaaaggcgtaagtagatcgcagttcagccacacctgagctgtgctaattcataccgcggtgtctatagtcatgaaggacgagtctattggtttaatactgtgcatttctcccgggctgacatcgctcgtctgccatactttgaagcccggaaactgtctcgccgcgcaatcaattatttgcttctaggcttgtcattgcccacaatactcgatgttaacaccaccccgttcgagtatgtgcgtgccctgaatgctttattgctggaattcgaagcgttccagcaagtgcatcccccagaaggcagctcctcgtcaagtcttgcaagggcccgtataccacaaatgttcaagcgggcggcgcatggaggtaccaagacccgacgcgccagctcggcaaacgagatcggactcccaatgcagtccagtgacccatcagacttgaagaacacagcagggaatcttgggtcggctgcctctgcctcggtcacctcctttccactcacagagtcttcggatcttcaccctggcgaggaatacacttatcttcttacgccatcgttgccattcgagccagacttctttgagacgtttgcaacgctgtgtgatgtcttaattgacacttatagccggctatgtgctctagtagcatctccatctgtatgtacagtggccctgggcgagatattttccaaagcagatgcccggttacgaaagattatggtggccggcgcagtgcgtgagttcgaagacgcgagccgaaacagtgtcaagagtgaaattgccggggtcagtcgggtggtgcttggtggtttattgggatagcagcaaggttttgctgctgtataattgggtctggtgtcggtggtcagttttgactggacacatgtttgggtttcttatgagacatgaatttatcgagttgaatgttatatgataatagaatttcagatctaaatttgagagcttctagcttctaataatacatatgttccgccttcttcagtacaaaaagtaggatatgaaaaacactcactcaaaataacttaatgggactttttttggaaatgcggcttcgtgaggcaaaaggtggtattcatgggcagcttgaaaagagtcgagaattgaaaaaagagacaggttaagacgaaaaactccacttggcgccacatgctcgaatatgcaaaatagacaccgaaaatatgctgtcgcttgatgttgaatgctgaggagaaaaaacaagggatatgctgttggaaagaggtcgcggaagtatgtcaaacgtatgagacattcatgattgtaggcgctgcttttcaagttcgcgctgttcgccgaagacgcggcggctcatctcgaggacggtttcaaatccttcgcggccaatctttgcattttcccggaagcgatcaacgcttgcctcctcaaccttgttcttgatcttttgccatccaccgcagagagcggtgattttagcttcttggctaaattcggtcgtggtagccgggctaagcgaggattgccggtagataacggtctcgcggacgctgaggacgttcgaccacgtcagatttgtggagcacatggtcaccttcttcgcgaccggatcgacataagagacttcgtaaacgtgagaggtattcgttccaccgagaatcgagagaacccattgtggcacagactgatcgcacgtgataagacgttcggtccgtaactaagaggcaaaagtcagtaaaaaggttcgggatatttggagagttctttgaggttgaatgactcacaataccagtcgccggatcgacggttcgagagagcgtgtctacgccaacgacgtgtgtcgacttatcattccaaggacagtacttgcgccagttcgccgttgatacttcgtcccacgagtagtcgaacgtgcatccggaagagaagaccttcatattgccgagtcgcagttcacttgaacgatgccgttgggtcgcgtgatcttggaatatggtatttgggtgtaggacagccttgacaagcgctgtgatggatagaatcggatggtagtgttaataaatccgagtagatatagtaagaatgattcaagccgagtgtgagagataggatgtgcaggagttgcagaaagtgatttaagtctaagtctaggaattggaaggcaaatatgagcaagtcaaatagaagaaaatggagaagagtggattttaacgatcgaccggtctgaggggaaaatccttcttttttccctccgggtcagggccggtcaacgcggagcgccacacgcctcgccgccaccgggtttttccggttcctgcttatctaatcagcggcgcagccgcaccgggcagatatgcagctgagatgttccagaacgtccaattaactctattcaatacatattcgtcgattcgggtctttatatcttctccttttctatacatcatggtcgaactcaggaaacgcaaggcgccagccccactgcccgtcgcagagaagaagaccaaacaagcccctaagcccaaacaagaggcagctgttcccgataatgataccgaaaaaagccctgggccaaaactccctgaggtggatgatacaatcgacatagaaactttcggtggcgagtttgagaccaatgaggctgaaaaaacaactctgaagaagctcctcgaggagagcaagaccggcgtggttttctttacttaccccaaagcctcaacacctggctgtaagtccctgtgtcatacttagtgcttctcttgagagggcagagctgtgttcatgtcgtactttgtaatcatcttactccagcagactgcttacgccgcttcatctaggtaccaagcaagcttgcttgttccgtgacaactacacccacttgacttctactggtctttctatctacggtctttcaagtgattcccccaaggccaacaccacgttcaagacaagacaaaacctaccttatccactcttgtgtgaccccaaggcttctcttattgcagccattgggctcaagaaaaaccccaagggtaccatgcgaggtgtctttgccgtggataagaagggtaaggtcttgcttcgcgaggccggtggtccagatgcgactgtggacgctgtccagaggattgttgccaactggtctagcgtggaagataccaaggcaaacggtgaagataccaaggagaaaggtgaagataccaaggaggaaggtgaagacaccaaggagaaaggtgaaggtaccaaggaggaaggtgataaagcagagtgattcaactcgagtgatgtcgtcacaatcacacaaaaagcgacactaagataccagatattgcatgtatggcaccgtctatggtggtttatttgtctcggtgtacgtgtttggcgtagattattagggctgtcaggttgtttttgaattgctgtggattccaatctattcagtctgagatactggtacagcacacatgatttcttgcaacttcccctatccactgacgatgacacctccgttggggtgcaaacattgtccggaaatatagctgctgtcctggcttgcgaggaaaacgaagcacgttgcgacctcgctaggttgtcctggtcgaccaatcggcactgcatggaattgttccatggcctcggtttgcattgtcgcaggaatcaggggcgtccagacttgtcttattagcatttgacttggaatagatataggaaggacctacttggacccgggcagacacaattgacccgaatgcctttcttcacctgctggttcgacaaggcgcgggtaaatgcgacaattgctcctttgctggaggtgtaatccaggagatccgctcggccaatgtaaggattgacggatgcgcaattgatgatggtagctccccgcttcatatgcggaagaacatacttggaaagataatagaaggggtgaatattggtgtcaaaggtggtctgccactggtctctgatggttcattagtaggatgcaacagccgaagagcagtaatatggggcaactcactcagtgacctcgctgatatcgctcagcatgttttggaacccggcattgttcaccagaatgtcaatgccacccatcttttccagggcctcgttgatgatcttttgacagttttccttcttgcgaacgtcgatagcgagagtatagcacttctgtccacattcctcgactctcctctttgtctcttgcgcatccgactcctcagctggcaggtaaacgatgaagcttgaggcaccctccattgcaaataggattgcaactgcccggccaatgccggagtcaccgccggtgatgattgctctctttccttcgagctttccagcggccttgtaggtctggtaaccgccatcctcggtaggaagatgagcagacacaggcttaggatctcccatgtcagactgcagacccggccttgtcaagtgctgaataggaatcttgtgacctatatgaaacacagtgtcaggaatcaatacttcacataaatcacacgtactcacctggcgcaaattgggacttagccccactggcctctcgctcgatatactgggcaacaggcatattggaaggtttaggcaagaatatgaacaagagtaatagataacttatgtaaatttgtgaatagagtacacatctccatgcaggaaagcaccgtttaagtaaagaaaatgatatatggccaccaataactaaagccgggcatatcaatgtcactatgatggcctgcttacaccccgtttgctccaaattttgcctatactggggcgatatataacttagatgttatgatacaaccagagcatctctgttctagaccttttctgtggcggtggtttaatcgatcatgttaaactattcgatccttcagtcgtagccacaagtttcccatcccagggacgacctgtatgtccaatcgggcaaagtgtttaatacctaaatgacacttctctatcccattcttgatattcctgagctgctatgtttgtggtcgaggttaggcaggtgcgaatgacggagacttgccgtcattcctacctaccatgcttagttggtggcgctcttcacctagggagctcgataacaacaagccctactgtttcatataggaataacatagcatatttctcctttttgttcgtcgggagaaagcaaagaaagatcatgggagaatattgagttctatacatacacctataaatgcttgagcaggtatatgagttgtttcaagcggatttagcgcaagaattgacgtcctggtatgcccttcaaatattaattggttccactataaggaagccatagtaaatcagtatggagaatggtagcaggttttctattgtagttgtcctcatgttgtagtcgaaatatactggaaatccttatcttatcaaccagcaacatgattggctcgtgggcgtccgcccggcgataattttttctattgcgctttccgcttctcgagactcttggtgttctaagaaattgcctggctcttttcacaatggcgaaagggcaacccaaatccaagtccgtgtcggctaataccgccaaaatccctgagcagatggctctttcgtccgctctgtcctctccatgggggttcctccgtcctacaaacgatttacatacagccgtcgtggattctgcaaagcacatcctggactccctcgctggttctgtcgtggatgcccagacaactcgccggcaactcaataaaaagcgcaaaaggtcagacctcgaatcggattcagtcacacagctccaattgaagaacctctacgtggagggtttcacctcgaatcaaatatgggagcaagcaacacgaattctcgagtcgactggtgacgagatcgagcgcgatatcactttgattactcaacatagcggctacatggagtcggctgactccgagcagctcgaggatatctctgaccccgagggtgcgcaaagcgacagcgacagccacgagagcatgcttgaagatctctctgagggctcaggtgccgaagacgatctcgacgaagaatctggcgaagagcaagagatcgatatgggatctgacgatgacatggaagacattgaagatatggacgatgataactcctcagttggctccgccgaaggagagcccgaagtatttgtcgaggatcgatttggattaaacgacgggttcttctctatcgacgacttcaacaagcaatccgaggctttggagagacaggatgccgcaggaggacccgagcagaccgaggacagcgacgaggaggatctcgactggcattcgaatccgttgatggctggaaattctgcgaccatcagtaaatcgaaggattcgcgcccaacagaaaaagaagacgaaagcatggatgatagtgaggaggaagggccgactttcggtaatgccgatctcaacggcgactccgattctgatgatgaagacgtcgcggacatggacgacggtgaagccgctgcctgggtaaacaccagtgatatcaaatacgccgatttcttcgcacctccaccccgcaaagcctccaacaagaaacaccgcgccctcccaaaaactcaacccgacgcaccagaggtcgatgagagcgatgtcaaacgcgctattgacgacgttcgacgggacttgtttgacgatgccgatgcgggctccgacgaagaagaggacgatattgacggatcagcggaccctagtgccccacgctcaacacatgagaagcagagagcacggatcgcagatgaaatccgccgtctggaggcggcgaacgtggccaagaaagaatggatgtatactggtgaggccagagctgtcgagcgacccatcaattctctcattgaagaagaccttgactttgaacgaatcggaaaaccggttcccgtcaataccaatgagaccaccgaggatatcgaagaactaatcaagcgccgaattctcgccatggagttcgatgaagtcgtccgccgtcggccaggcgccgagggccagcaagccggaaggaaaccccgcttcgaactggatgatacgaagccacagcaaggtctggccgagatgtatgaaactgaccatcttcgcgctaatgatcccaactttgtggatactaaggaccgcaagttgatgcgggaacatgccgagatcaccagtctttggaacgaagtcagcgctcaattggatacgctatgcaactggcactataagcctaaggttgcccaagcaagcatcaacgtcgtgaccgatgcgccaacgattatgatggaggaggcacgcccaacggctggcagtgctgccggtggccctgttggacttgcaccgcaggagatctacacacctggcgataatggccgagttaagggagaggtggttcttaagactggcgcgcctatctccaaggaggagatgacccgtgagcagaaggccaagaacagacgccagaataagcaaacccaaaagaaggccgatgctgccaaacccactcaagaaaagcctggcaaggcagccgagaagcagcagatgatttcagacctcaagaagggaggagtcaaggtcattggcaaggacggccgtatgacgaatatcgagggtggctctgtccacgagggtgccaaaaacagaggcgacaatctgaaattgtgaggagtatatttaagggccagtatgtactattcaggagtcatatttcttctacataaaatctattttctagcattgcacatatcatcattttgtgtcacttttctggtcgatacgtttggcacgtatcgtgtagagaaatatgttctctctattatagctttcagcaccaggatcatcccggactggctccatgtcgaaagcccttttcgccatcttcatgaaccgcatgtcggcgcgtctacgacgcttgtaacaaaagtaacagaccgagtcaggtcccaggaggtgctgaagcgtagtgatcaagagcgggaaagccggctcaaaatagacacagtctgccgcgatgatgacatctggtttctcgggaatctggtttgggatcggttctccccagtttagtatcgcagctgtcgcatttgggccaagattgttaagttgaatgttggacttcattagggaaaacataggctcttggtctgtgatatagatcgggtgctcgagacgacacgcacgtgccacggcgagtccgacaagtccacctccagcgccgagttccacgctattcaagattggattaggacgaaacgagcgaagaagagtgaatggaaagaatgctcccggccggttgggcacacagcaaagcaaagcagcacccacattgttttatcggatagatcggtgatatggcggctgaggaggtatttggccaggaccattcctgcgggccatagttggccgccgcagccgtctttcaggtcttcttttagtagcaatggttctttgaggagtccgtcgaaggaaatgtctgtggtcactgcggctttgggttcgcggggaggggccagggattcgctgattttgagtccgtctgggcttgagggtgggctcagttctggaagacccagaagagttggtatgggtatttctatcattgtgagaaatttgtgaattgttgactgttgatcggagaaagttttagtgggggatctgtacggagtagcttatcgcgaattagacctagaaggatcacctgattggttgagtggcgatttggctattaatttagatcgaatataagaaattgatcagaagaatggaattgtatttttttgtttttgtgtgcaggtttatatcgtctatcatatgcattgtatatgcaccggatccagccaagacaagcttatgcccgtgcgaacgtcgatctatatcatatcgatacttatgttgtatgttcttattgacatgctaggacattgagggctaagtgacttctaagatataggaattgtgtatatcaatatatgcgcatatataaacaaaggtaccatagttatgaagcttgcgtggggactcttattggaacttggcgatccatgtgggttttattaatatctcgttaaccttgaaatatggatctacatctaccttccagaggacagtattgtgatacccctcataacgttgcatccatgctttgaacctactttagtcttataaaagctaagtctagcgcatgtgtaacggcagtatgaagtaaaattggacacatcgatgtcatatttgtgtaaatttacatgcattaactagttaagcgcaagcttgacaagtacatatgatcacagccactttgttacatggtctgtgatctcacaatctcgtatcatttactcgaacgggtgagtacgtgttccccaccaggtgaggaacaaactgagtccaacagtctcgaacaccctcgagaccgcaccgacagcgactgtatcaaggggtcgcttctcagagaagagctggctcacaatctgtatatatatgtcagatgaattgcttggggtttcaaggcaggatgaattgaaaacgtacgcctggagcggagcttgcgaagaaaataagggagccaaggtacgcagcacccttgtagctcagtgtgccggtggcattgatcagtgcagccacaccgtaggtctgcacagcacttccaacgagggagcttccccaggctgcagctgcgccggcagcttccttggacttgatgaattcctccttagagttggcggcttgagcgcggtggtaggtgtcaccgaagacgggggctaggatgcccagggaggcagtgtgggtgaagattgtacccagcgcaatggcggagggcttcacgggagggagatctatattgtaagttgttagtttccaagtacagtcttgggcatgatgaggttatcaactcacagtgcagggtagtcatcttgaagttattatgagtggttgatgtagagtgacaagtgaattagaagagttaaagtactttaagtactgagagagggcgtttctgcaaccagggtttggaggtgacgtcgtcatgattcaacgcaactgtaggatgccgagggccaatgacgtcaactcgcatacggggttagctatgtataaccaagatttcgctagaggaaatcaagggtgatggatcataagttcagatgagctaccttgtggggaaagtaattaattcgttctatggctgtaggcgaatccttggacgtcgttgcggagtgttggggtgcatcattatagatcgccatctagatgaaatccctcaattaacttgacttgcataggcagaagaacttggaatttgaaaccagcttaaatcggctagtactacataggtagtaaatatcgtcaatgctgggctcctgtatgatttatccaccttcgaggtaccatcgccaggtccggacatgcatgtagatcaaggggcgattggcaagctggcaagctcgcaatacatgaacatattgcacaataccctatatctagatatcacgatcgttcgactcaattccaatttcatctttcttttcaattcatctaatcccaagactcgattgcgttatcgggggatctttcaagccgagcggggacaaaaagctgggtctagtccggctacagccaccctcttctacgacctaacagtcctgcggagccttcgggtgtatgaaccaccagtgcccattgtcaataacacaaaaagtgggcacttcgggtatttatttatagctattacttgcggaacttgcaatggccgctagaaactcatgaaaacgaaaacaaaaatgacatgtatttgcttgcagaatgtgctggctaatcaaacaaagacccgacaggaatatctgtagtaaaagattagactggagcgatagaatggataattggaaatgcatacttgtcagggtagccgttctctgtaccaagctcatacttagattgtgaagccttcgcagcagtgttgatattgcaagggctgggcggcaagccgttggcacccaacacaccctgaatgctcttcttatcttgcgcaaagagagccgcgaggccaccttcttcgccctgctccttaacagcaaccaattgctgctctccagcctctccgatcttgagaacgtcgtccttgggagcggccttgcttccaactgtgagcagaccaactgcatcggcctggcgcacagtgctcagttgagggtagctcctccgagcgtcccgcttccagtaggggttgtcggcaatatcgcccgcgggtatagtgactgggtcatcgtaggcaagagggggcaaagatcccggggtgggattacggaattgagcgttcagggggataccggtggaacgttcggggtcgacagcgagaaggcgacgaatgcgctcccagacgccgacggactggactgtgtatttctagagcgcaaagaggatcagcacctagcgcacgaccgtataggttggtctcctaatttctgtcgatatgaccgacctgcttgatagagatggcattgtttgtcgccttggcggcattcacgaaaccgcgagtcatggtgaaaagactctgccctatgatttaatatcagcccattgacacgctaacgccacgaggttgtaagagccggaatttgttctatgcccccgagtcatttgacttactgactgaaatccctgaaatccgtcaagagtccgtagcaagcctctagattgagccggtgcgtgaaggtaagtccggaggaggtacgatcaccggcacggattattttattaccgaaccaccacaaattcttgtattagtaattgaccgacgctgcaactttctatgatcaacgaaagctgagtctagttatgtcttgcactgagaaaaaatcagattatagagatatggttgaaatatcgagatatatacttggctaggcatctcggtaaccagaattatttgctatggaattcctcccaacaatgtgttttcaaacatatcgctatcccacactctctacaaccagacctccctcgtggagcttgttcaccccttttgcctttttctctcttaaactgacaacaaacacaaggaattttcttgtctaggacacttcgccggtgaattctgacctcaatttgctggtttggtagaggtcggactcgtggtgtttgtggcaattcggctgcaaattgaaagagtttttgatatagcccgtagcgaaactctgtttggctcttcttcttagcctgtcgctgctgcttatagacattttgaatgcgatgagcattaacaattgctgcatcaagaaagaaaaaaagtagtaggaacgacgtcttctcaggaatctcatccgcaggtggttgcagagcaggtggttgcacatcagatcagatgactgcacataatatatttgtggaaaacgtggtggcggaggtggtagaaaagcaagtggcatcttgacagtatgcttcgtacggccaaaacagcgaacctcagtctcatcatcaatagagatattgaaccctggctggtagtactgctgggcagctttctcgaatgaagaagctagaggttctagtttataccaccaacgtttatcctgtggttgagcctgctgctgaccatttggccgagagatatgtataaaacgcttgatctgctcaaagcgcttcagcatcatataaagatgaggaagatgcactggccctttctgaatatcccgccaccagtagtggtaaacacgtggagattggtgaagactcatatatactagagtaccaaagaagaccttgatatctgctatagtagtatccgtccaggcccgggcagggctagattcggttcctcctgcttgtcttcgctgagtatattcattggttgactagctaatgaattcgaagatatcgtcgctaacaaatagagagaaaagcgcggatgggctatcgatatcgagcccactaggtagctggagctgtggaggacaagaagacgggaataatagctgtggtgattccacaatatgttcgtcaagcttgcgcttggtacccttgggaggcatagcgggcaggcaggcaagtacgttagtaggtattgttatagaaacgcgctcaaacaggccatgatatccaatcataaattaggctaatacactaatcaaactgcgctaaaggtctttcccaaaagacagacgaggggttacatgggttcatgctaaatgccattcatcctatctatccatggaccaggctttttgcctacggagcgggttctccttaatgtaacgcaaagtaaaatacaacatacactcctgcaacaactagctagatcaaaaaaatagtcgtgcccgggatcgaaccgggaatcttctcggtgtgagcgagacgccatgaccattaggccacacgacttgagacgataattgaaagttatctttaccatnnnnnnnnnnnnnnnnnnnnnnnnnnnnnnnnnnnnnnnnnnnnnnnnnnnnnnnnnnnnnnnnnnnnnnnnnnnnnnnnnnnnnnnnnnnnnnnnnnnnnnnnnnnnnnnnnnnnnnnnnnnnnnnnnnnnnnnnnnnnnnnnnnnnnnnnnnnnnnnnnnnnnnnnnnnnnnnnnnnnnnnnnnnnnnnnnnnnnnnnnnnnnnnnnnnnnnnnnnnnnnnnnnnnnnnnnnnnnnnnnnnnnnnnnnnnnnnnnnnnnnnnnnnnnnnnnnnnnnnnnnnnnnnnnnnnnnnnnnnnnnnnnnnnnnnnnnnnnnnnnnnnnnnnnnnnnatggtaaagataactttcaattatcgtctcaagtcgtgtggcctaatggtcatggcgtctcgctcacaccgagaagattcccggttcgatcccgggcacgactatttttttgtctttgtgtatgaataatattttgtcttgattcattatatcttcgtactaattggtgcctatcgccctggaagtgtaagcctttctatatcttgcgagcttatatcttccatagtttgtattctatttcaaatacaacataaagtgcataatttattagagttgatctatgggagtaataactacggagtatacaaactgcgacagtaacttgggttctaataaggaaaagcagactgcccgcggctttagcaccaagaataggtagaaaatcttcaccacaagcaggccgatcaccaacacgcttgagataagccagaatgttcttttctggatcgtcggatttgggggttcccgggtcctttgggtcgacagtcccagtaatgggagacgaagggtttactcttgtaccgttggtggagcatgagagtatacattgtcaacatggaggaagtaactattgactagattattaacagattaacagattacatggttaactaggtagttgttaccgagtgcatgaaatgttcaaatgtacagatttcaaagctgtaaggtgagctctaatatagcgaaataaagctacgcttaggttgtatcgcgagtcgacatatgcggagtgtgtggttgaagaagcggaggaaagacggcgtgtgacctggttcaatatctatcattccaggataaactgcgacccagcggaaaaagtagacatccgcgtcttgagaatattacaggcctccagccttcaagtgctctagcacggcatccttaggcaaatatactccgtaatcgtatgtaacattgccacaaagcgccggcctctaggactcctaccgaggcccggggtggcttggctataactactgctgcaagtgactttataactaatgtattattgtataacctcagcggtactccataactataaaacccgattatggtcatctacaattcttgtcgctatggcgaaatatagactttcttatcgtctcaagtcgtgtggcctaatggtcatggcgtctcgctcacaccgagaagattcccggttcgatcccgggcacgactatttttttgtctttgtgtatgaataatattttgtcttgattcattatatcttcgtactaattggtgcctatcgccctggaagtgtaagcctttctatatcttgcgagcttatatcttccatagtttgtattctatttcaaatacaacataaagtgcataatttattagagttgatctatgggagtaataactacggagtatacaaactgcgacagtaacttgggttctaataaggaaaagcagactgcccgcggctttagcaccaagaataggtagaaattttgtctttatatgtgaacaatatgtagtcaattagtatagcctaattagtagttagtatctactacagactgcaagacttcctcgctctctacagaaaggagtatcttggagatatttacttttgcccgccgccagataatgcgcctagcggatgcccttgcgatatcggaaaggctcgcaatgagggaaattaactcatggaaaataattccgattctcaaatagaagagacaaaggatatttcaagccagtcaaatgttattttctagcaatgtataactataaaaagcttaaaccagcgtccagtaaaccattttcggcagccgatttgccgtcaaaccagtgctgtgtaaattttcttccatctaggcatgttttgattctcaatggccatcatagccacatattcggcctcttcgcggtcaatctcagccttgcctgtccagatatcggcattatgaggcttgacaaactcagtcctcttccaaatcttccacccagcaaatgccatgacatagagggggattccgatatatgaagtgataaaggtcttgtagtcgaaattgccgtatttttccgggttgtggataaacacaccgaagctgcgagtgaaggccaccaagactgagaaaaagagcgcaatgcaggaaccggtgattcccaggggagctttgtaggccagtgttgcctcgtcgacgccctgtgcacgtcgggcgcgaatgaagaagatgtgggtgatcaagagggagatccatgtcaacactgtgagagtaggtcagaataccggacacatttcgagccattttgggagggaacatacatccgaagattgacaccatgtcagtgaagtatccgaatacctccttggagccattggaaacactcataaaggcgagcaagcagaaagaagccgacagccccagggcatagactgggacaccagcttggttagtgcgagcgaagattcgaggggccttcctctcacgggcaagaccgtatagagtccgagtcgcaatgtacagatcagagttggcggcagaaaacacaaacactaagatacagccgttgatgatgtgaggaagagcggcgacttgcttcatcgccaccacgaaaggtgaggcggcagcagagctcttggccttggtagcgaagaccaggtctggagagttgtacgggaccagcataccgaggaagagcacgctgagaatatagaacacgataattcgccagaaggtgagcttgatagctttggggatggtcttccgggggttctgagcctctccgacagttacaccaatgagttcggtacctagcaaaaaggaaaattagaatgcgaaaggcggaaagttcaatcacagaatgtccataccgaggaatgcaaaggtggcctgcaccagtgtcgaccaaaaagcgaggaattttccaagggaaccctcggtatatttagtagcgaaggcaccgggttcgttccagtatcggaagcctctcctatcgtggtcgggaccaccaccaagtgcgaagatgaaagtgcacaaaatgattcccaggatgacaatcaccttgaacgatgagagccaaaactccatctcaccgaaaatcttcacgccgaagcagttgatcaatatgattgccaccatgaagatggcaatccaaacacccgggttgacattctctgctgacgtcctcggccaataggtaatgactagagcagcggcggtaagttgcgtgggtggtaggataatatatttgaggtagtagctaggagatggttagacatccggtttatactagcatgtagcttgggggttttactcaccaccatccgagagtgaatccgagagcagggtcacagaaacggccagcgtaaccagtgaaaccggaggacaatggtagccaagcagccatttcacccagtccacacatgaccgtccagacaacgaagcccataaagcagtatgcaataagcaaagatccaggctggttaggaatggttagtcaacggcaaaagatgaagcaagtgaatataacatactccggcgctataggcttcagtcagtagtgtttcataaacaactgtatccaaagagaactcacgttaaagcgctgccagtaccaacaaccaatccagtaccaatggcgccaccgatggcaatcatggaaatgtgacgagccttgagctctctgtgaagcttgactggctcatcctgttcaccttctttgaaatcccccgagttgtcaaagtactcaggctgcgcctcgatagtgttaatctcatcggggtgacccatcttgctgtaggccgaactgagaatcacaacacagagatgaagagaattgaccagactccaggagtagttgcggggggtgcgcggggactaaatgggtccaacgcacagtctttaagcgatctgctatctttcgcctcttcgagtaaagactaatattggagatttagtgactaggacatagttagttagctgtggggtgccaggtccacgagccagtatttcactcacgtaactttttggtcagagtggaggcataagcagtcagaatgcgatatatacttcgggggcctttgcgtccttgcgtcccccaagtgatcttattggtgtcttattttctccaagttatcccccgcaatacgtttttcccacagaatcaaatgcatgatcgcaaggaatattgtcccctattgatatttctggatgtgtcccctgtgttcctggatccgcttaaaaagccctatacgaaccttctaaggttggaaggggcggtccggccaaatgcgccaacactgtcggcggtgcgcttggcatccttggcggacttggcacggttacactcgggctccctactaaatgacagatctatagttacggagtagttactccatatactggtccacactgaatcctttatcagtggtcccctcttccctgtgggtatttgcctagaaccttggaagataaaaggtgtattacatattgtaagcaatctgattgtataacaaattctcagtaggtttcagtaaacttccccacaagtatttactaatggatattacaaaccttgaaaagcgtttctgatcatgataaacaggccaagccaggatgacacagcggtctcggtcaagtattcccaagaaaggatggagttggtctgaggttttgatttctacagcactacggagacgactagctttttgaatgggtagatgaatatcatttgagcaaatagcgggaatttccaatatgtattatgtagcaagtacacacctgatcggttctacctaagagcttctctgtctgagctcaattttcatctttttttgctctcggtgaacaaacactgggtcaaaaaaataccgcaaagtccttatctctctattcttcttggtatggagtacagtttatgtctcatgaaatgcacggacggcagatcagctcattcgggccttggctagaaggctagatggaactttctaaaaaaataacgtttatcttcgcggaacctcaagcgaaatccggaggcctttcgataagacttgcgtctcgttagggctgctatcagaatcaagctttgcatttgagtaactgcagaattctcctattatcaaactttatagttaaaattttaaccaacttcctaatttggaagtctggtcttgggaaccttggcaggtcagatctttcagtctcggcttgaagccggcacctacttaggaagtgagattcaatcctcttgaaaagtcatatttaacgcgttgtaaagatatactatgttggaaatgttgccaggctagaagcctgttaactaggtacaaatacgattccctcttcttttctgtcctcctctccgtcagttttctctctctgtttgtcgcttgtattgcattcccttggggcaccgagacagttaaattctgattactttgcgggataatgtcaaaatcatgacctgtgctacatccatactgtggagcgtggtatatttgtgtgcacatatatatatctctaccatcgcattttacttgacctgcagcagtcgacttatttccagttaccggattttattgttcttattcgtaattcctccattacaaatccatacttcattgctataagctcatctaataccggattcagatcggcttcacaacaagaatagtcgaccgctcatacagcctctatccttgacaatgtattaagatgattatatccaagaaaatcccgatgtgtttttggatgtccttatagatatttttatgtgtatataaacgccgcaaaaaccatgacctgtgcaggactttcctacatgtcaccagggatgaccaaacgctctataaattcctttagacggaagagtaatttttttttttcatcacaggccaatgtcataagaagcaaaggcgaggtttcattggtagaataaaggctagtcttggatacctcaccaaggtcttgcttgatgtcttctcctggtacaagatgagccacaaagttgaaggtgtctgtaaccttctaccctggaaagaacaacgtgattggttgtacttcaatggaaggtgcaaccgagggacagatcaggaaagtaggaaggtgcatattcaaggaaggtacgcgttgtctcagcgcagagaaggaaagaaaggagaagctaggcgagaaccccagtcgtgacgaactaggaagtgacgacggagcggtgcccagatggaaaggaaacgttccttctatactgggtaagcgagacaagcgagtaatgtcctcatttgcatggtttgttcagaaagcccacaaacccatgcgactggggtataaaagggtaccctcccccctgactcccttctcttcttcttcttcttctcctcttcccatccctctgaccaccatctctccgtagcccccatgagacagcgtcggcagagggacccgtagcacctgctgcccaacctaccacagggacatcaactttaccatgttgtggaagtccgtgtaggtcagcaacaaacatcaaacctggctttctcgtggatgttcctgaagtcgtggctctcattgccacttgacgagtcccacggaatacatggggggtgtaaatctccgtagccgacgactcgtaggtttctatgcactctcgagctgtttgtaattaatctcagcattgtgcgcgcctctagttcctagttcccgttaatctttcaacattactgaacaccaagggtgttcattaatatgtaggtagtcaccttgtgctgtcatcggtgctcggcgggaccctgagctgcacccaatcgggaaactcgcgaccgcctaaagtccaatacatagagcgacacatgtaagtttattaaagccagtatatgagacttcatttaaattcttttgaatggatattctgacagacaaggaaaaagggggaacagaccaatcaaagtgagagtaaaaacaaaatatcaaactttaaagcctggtattgatatacaaagtaaaaagacacataaaaactccacggcggtcaggttgagtcacttaagtttaccatgcactatgaccgaagaggcaaaaaacagtccaccatatcattagttttaagagactaacggcggtaccacatgcgtgtgattctggtgtgtcgcatcttcttttgcagctggaagataccgtacatcaatgcctcagaagtgggtgggccttgggttttgttagtcaagttcaacagcacaagggcaaggcaagaggaaatgcttacatccaggcacgtagatatcgaccggcacaacccggtcacagcctcgaacgaccgagtaactgtagtggtagtagccaccaccgttggcacaactgcccatgctgataacccaccgggggtcgggcatttgatcataaacctggcggagagcaggggccatcttgttcgtcaatgtaccggcgacaatcataacatcggactgacgcggagaagcacggaaaatgattccaagacgatcttgatcgtaacggggggtagaaaggtgcatcatctccacggcgcagcatgcaagaccgaaggtcataggccacaaagagctttgacgagcccaattggtaatctgatcgagggtggtcctgggtgatatagggtcagcgaaggttccaaggcgcatccaatatcaaagccatagagggcaaacgaacaaggcatattgcatagcaccctcctttttctcctggctaggcaaaggcacctctcggcgagtcttgccggacgcggtcaattgctgggcgcctgctgatggttgacgctcgagcgctgtcgctgatttgattgacgaagtcgagagggccgccaagggttgggcacgcgggagagaggcaacgaaacggggtcgcgcagctgttttctgttagtgaattgacattgtcgatgaggtgaagaaggtcctaccgcacagagcgccagagatggcgggcttcgccatcggaagcatcttgagaaaagtctcttcggtggagatgaacagctagaatgaaaggtcgtgatccgggatttgaagagattagatggttgcagcgtcggccagtgacgacaagcaatatcgaattacaagagggcagaggtggcgggccgggtaactgcaagacaaggagaaccccaaaaaggttccgattccacagtggaagaacatgatgtataccagcggttcgagagagatgacgtaagctatcacctcgcagatcattggcccatcggctgtatttttcagtcacggaacctggtatggtaaaagcggtgagctgctcgtaaatccaattgcctgtctggtcattggctctgagctcattttgctgcctgggtgcctgaacccgtcttccccatacaacgtacgtgggggattggagacaaccactccactactgtctacactttgactacaaagtaaccgccccttaaaagggctgctcaattcgagagcattgtggacatgatatggagagctaatacctcccaaattagaactctcacctgatcacagtgccaagacaagggaatcagtccctagttaaaccacaagagcccaagtgattgcgcagtccccatatattgccacgtcaagggctatcgcagaaatggcgggtcccaaaattgcctgcattggcgtgatcgggaaggcagtacgtatcactctactaacttgctcgtctggaactgtccgtactgactcgattgcaggataaccctcttcacatttccctgtttcccccgtattcggattccactatcgaattctccttcttactgaactcctgcctcgacatcttcgacatccgctgcaaacaaacatccattgatcaggatctaggtctactacatgcaattgacgaacgacttgcggcctatggatggttgacgaccacgggagtaaaactattgatcattgtggattttttcggtcaggaagaggccagcgctggaaaacaagcaggcgctgcgattaatggcctgagagattctgatgtcaagccggtgtgttatccctctgtgcctggcgagtgcttcaccccctaattatttcatacaggcattccgcgcattacagagcgcatacattcagcttttgcagaatccattctattcccccgacgaccacgtcccgattgccgggaatacagcttcttctttgtctgcttgccagccaatctctaacaaaaagttcgttgcggatgttaaacgtattggggaatcgtgggctccaggtacttctctgtaggaagagaacgaatgtcggatttgaggatacagataagactctggtcaaccaggcttcccaacttacattggtacaaacagcaacaatttcaccaggctgttcggataagagccatatcatttctttgtgattaagctacttttgacttccagtccgtatggcatataattcatgaaattctggatataatagaacaggcagtaaaaataggatcctttttgtcatcatgctgattcgcgttggtagtcttcattttcggcttcggcttcagtctgctccagggcaaccatgatctctgccatttcacgaggatcggaaatagcccatactccaccacctttggtgtcaactctcccgacctctttgccaaccaaattcctgccaacctttcctggtccaattccgatccaccgcttcactcctcgttcctgatgaagatagcgaatgctatcccaccacctgactgtgtccgtgcactgtcttgagaggaggtctttaatgtctgccttagactggaagggcaaggcagtaacatttgatatgcatggaattggtgccggaaatgtgatgttgatcttctcgacagcttctctcatataatctgcagctagcgccataaccgggctatggaacgggcagttactcttcaatctgacagcccgcgggtcgtaacctccaaattgacgcatttgcacgagaaggattctgattcgttcaatactaccacttagtacgatttgattttttgagttgatgtttgcgacgaccacttgttgaatcgatgagacgcgattatcgccgtcgatttcaatacccggtgattgggagccaacaaattgctgaaccgtgcgaagcagaccttccaggtgctcgggatgacagagaagtgcaaccatgccatatgtttcaccggattgctcggttaaatggcgtgtacactcggccatcatttccgcacgatggcgaactaatcgtaaagagtctccgaattcaagatagcctccggcaaccaatgcagagaactccccgaggctatgtccaagcgtcacaccgacccgagatttagtatcgaatccaaactcctgctccagaatacgaagtatcatgactgagattgccatgactgcaggctgtgaattttccgttcggttgagctcggagttcgggccatcggatataatgctggacagtttgaacccgagggtgctatccatttcgtccagaaccttcgacgcggtgtgagggaagtgttcaacccaggtgttggccatgccaacccgttggactccatgccctattgcgctttgtattagcggtcgtttgagactcaggggcaaaggggtgggggcgatactaacctgggaaaaagagggctgtgtgcaggtctcgtctggagggtaggatagtaaggtttgttgttctggaatttgtaggcgaaacttgcgatacgacatgcgcaataaatcttagttggaggtgacctctgcgatgcgacaagcgtgagagcatcttctctatagttgcaaccctaagcaaccctgtggggccttgatcttaaccgtatcaacacaacgcatacgcattgtggctatttcgtagtcgcgagggtgagatccgctatcccatggagcgagggagtgttgttcttgagtccatcctggtgtttacgaagggagcagtgagctccgtgtggggtgatatgtgggattcacgtgagccttttcggggtagtcggctacggaattaatattccacatccaaccggcaagtgttatgcatatgtctctaccggtagacctacaatggagcttacggagttctcacatataccgattctgtgcgtattctgagagcaaccaataatataaactgtttagctacgttctttagcttcatagaatatagctaaatacctaattgagattggtgcaaagtatgtatgctatggtattcgctctatacagagccccacatttcaatgagcagaatgggctggaataatgtgaaatgttattctagagtcaatttaaatggctattcgcatattatatacatctagaatatgttaccattctgaatgcatatagatccatgatatatagtgtatttaatagtacatgtaacttacactcatgtaccgacctgtacaatatggttattgtctcaccgctttcggacaaacatcctcgattgttattgaccaaccctatcactgctatcaccttgctccaatttaaacccatcctcttgggagagctttcttctcgctctatctctctcgttctctcaattacgaccttaaattaacaccgcagagtgaatcggacccccaagggtcaacaatcttcgaagctttcgtaggctagcgtgtgttcgcgacaggttgcgtacattgaaaatgttcgtcccaaaagccggtggtcgcaatactcgtcgacgccagcgaacaagctcagatgactctgtcaaaccaccaaaggccaagaggcagcgctctgtcctgcgacgcccagatgaatccccttccgataccaatctgggacgtgagatcgcaaaattagcaacacccactgcgccaaacgatgacattacccctacggatctgatgaacgatttgcatatatcagcccgtggtgcgaaacaaggcgatgggtctgggaataataacgaggggacaatcgttctggtgggtctttcacatctttgcgcgttccttcagaccctcaagtccaaagtgctaacttgctggattcaaagtcaagcacagatttctatactgtcgatcaactgccgtctttaccagatcaaattcgtggcttacaatcaggtatctcaaattctatagctttcctcaccttgggttgcgctttgttgacactcaccctttgaacgcagaacccctcaagtgctttttcggaactggtcataactacgcattggctttgacccgctcgcatgccatcgtgtggccctactctgcgcccgcttcttccccgtccccgtcggagacgttcacggtatcgattccggagtcttgcagagatcccaaaggtgccgtcccactcggagttctattatccacggccacgggagatcacccaggtctactagtgatcatcccttctacaggaaaagtcatttactgggagactgtatccagtgccgcgtcattgggtttatcccggcaaaagcagaatggcatccaaggatccacccctggcatgctttccggtgagtatgccacggaaatactcaacggggagccttcgggagtgatcgtcacgttctcgtccggacgagtagcacacatcaccttgagggacccccagggaaagccttcagtggtcgtgaatttcctcagaagcaccgcaggaagtggaggcggtggaattttcgggggcctcaaaaacgtattcgcaggcgggtcatggagaaaagaggttactgcggtccgggccggtggttctcatcaacgcggccagcgagatatcattattgcaacttcgaccggattggttgagatatgggacacgcattggaaccatgggaacaccctcaaaaaaagatacgatctcaagaacgaaattatggacgccctccctgaatatcatgcacagccgacaaacgatacagagctcaaagtcatggactttgtgttctctgccctgcagtctttcgacgatgctgtccaacttcccgatgggtcctggcgcctctttctggttgtcaggtcgccacaatggttggaaactaggacgctattcgtggttcaagttcacctatcaggaaacgaatctcgtgttatgtcaacacatgccgtggatgttcgccatattcctgtctcccaacttgaagcttcgaaacccaggctatttgtgccgaagccagaagaaacggcttttatcctcattggccagtcccttgttattttgtctttaacaagtgttgaagagactccatcctcacaactgcttctcgattccaacaacctgcctctgcctttccaagataccatccacttccgctccggcacagaacacgaaatcctggggtccatctcagaggaccaatcgaacgatttgccttgcgcagcatgtgtgcttatgcttcggaatttcggtgtaattcgtgtgacggttctccctcgtcctagcacagaacaagatgtcgaagagcctcaggtcacagcaaagcacaagcttgagcaggcggtcttctttgggaccatggcaaaaaatcctttgaatttatccagcgagggagacttgaacttccctccatcagaaatggagcaagcatctttggaaatctgcagggagctcctccaatcagaaactcgcttcattcctaccactgctatttcactagagcaaaatctccgcttgagagcaaaggcactagatgatctcgcctcattactatcacgccaagggaatcctttgagtcggccggcaaagtgggagttgctgtgggctgctgaaaaaattgcagcacaacgagctatgtggaagattcaagaggcctgcaagacaaaaaatggagacgaagaaactttcctcggtcatgtcattggatctatgcacgaaaaattcaagactccaatcaacgcccaacacggagagactgatccggtgcgtcaatggttcctgagagattcttatcgcatggagcatatcatcccatggatcaagaacgcaatcaagtccggtcggggcaatacctccaaccctgcgcgcgcattgtcagagaagatcctggcggcgagtgagctttttctggcggtcaccgaaactgctttcagatatcgcgatgagcacgttgcactttatggtcttcatggagacttcctggaggatggtgtgctttctgatggatatgaagatctccccgagttctggacatcaagagctgttggttactctgaagcagggcatctactcgatttagaactggatagttgccggtcatggataacacccgcatcggctgctgatacccctgacacacatgttttgaatcaagttgcgagaaacagctatcgacaccttcgcgtgatcggtcaaatgcatctcgagcggactcgatggctctctgcgcaaggagatcccaagctaatggatgaaagtgtctcgattgagcaggcccacgtcgaagaccgcaaatggcaactcttcaagctggctggtatcggccatctcgccgatgccatcgaattagcagaaagcttccgagacatgggagcattggtcgagttaatcatcgagctccaggaccaaaaagcaactcaaaatccgcgcgcagagccaccaattgacgtttccacgactcaaactgagatcgatgcggatcaattgatcgccaagtatttcgacaagtttggtgacctatgggcggatgcatacttctcccggcaaattgctatgggttatccaggaacgctgtttacgatgcggaaataccaatccgccgtcactcgattccttcgaagtaaccccgcatattctcgcctgagctggattaacgatgtcattggtgaaaacgattatgacactgccgcagtctcattggagaatctagcgattggcagtgaaaaggacttgtggagccaccgtgtagagatctcgatagccaagctaggcaaactagcgacgcaggagcaaatggattcacccgttgtggcttctactttgcaagaggatttgaagcgtcttgaggattacgttgaggtcgatggaattcaagacattctctatcagtatgttgagcctgtactgcaaggtgccattgacgaaaaggcagaacttgaactagctctcggtcagtatggagaacatatcttcgaagatcggccatcgctccatgaaatcttaagcgacgctctctctaccttgatcgacaggcaggttgtcggtgccgatggcctgattgatatcttgacgttgatgggccctactcagctcgcagatgacagcgagagcgagattgtacgaagcgagttccatctcgcattgcaggttcttgattacggacgctatggccagcgagatcccgcctatctcatggctctacagaggttgatctggcgacggtgcttgatcaaagatgattgggtagctcggggcaaagctgccgaggggcccaatggcgatgcacacaactcggtcgccgacacggcgctctaccgatcacttactgcatgcttggaaggtgagtttgttccgaatataagcacttggactatcgagctaactaacgtactatatttagaacctcgaaatgctggtccacactctgtttacacagctctctcgcccgcggaggctctgatgaccgattccgattccgatattcttgtgtcacggttccgcccagagcaaaaagctcgtgtggcagccgatcttcagaccgagaatgatattttgcgccagtgcattgatgtcggaaaacttgatttctggttccaaaacctccgggaaactgccgaggtccatatatctcctcccaaatagaccgcctatgattgacggtgaaattgctggagcaaatgattgaattttctatacaattgacacgggtggcggatgaaatggcggcgttttcaatattatcactcggttatccggtggccgatgggtcataatatgttgtatgtatgaaatctcaagagatatttcaattgttcaagcttcagtaagaaaggccctaaagctacgttgtacttgatgaccctcatttttagtgaaatatgaaagtcatgtttgatttagtttgttttctcagactcccatgcaatagatactggttcggggaaccaccgagtcatggagtcacgatatgatccctagaatttaccttgttcacgttcgacttactcgccatccaaatatcggaagctcaagtcgtcacagcgccagccgagactctttaatacttcctgccctcacgatcagcctcgctatcgttgctgctgacagtatcgaccttggtcacgggattatcattcccggcagccacatcagcttcaccaaggatctcttcctcgaacaccggctctgggtcaatagcctcgaacttagtgttgaagtcggccagaccttgggtgctgctgttggagcgacgcctggcattggcgaacgagtagtcagtgtcttgcatttcgtcgcccgatcggcccctgtagcgagagaaatagcattagctagctgcacacgctttattctgacgtgcaggaattaccaattgcctttgccgcccccgtccttctttgtcttgcgcggatcagcgtcagttgggccggacttggcgaagtagcgtgggatgttttcacggggtcccgtcgcgctttcgacttggtgttcgcgatcgttcattttgtgggaacgagtcactaggagttgagtcgttgggtcagtggaatgttcactggggaattgagatggcaagtatataggtatggtttgatgccaaggtatagaagtatatctttcacggtagaagcttactgttgtcgatggtatttgatgtgatggtagatgaggaattgtgttcaaggagagatgggaaatgaggaaaacaagaaacatgagagcaccagatatcatgcaatccgagaggggggcgtaggactcgtgacctcatacccctagagagtgcgggggttggactaatgggggctccaccaaccttatttcgtctaaacatcgtcgagatatacaaacagtcttgatgaaaggaaaacaggcatgtatttcttgttctttctttgaattgtcgactcaaggccaagcaactatgcaaccaatgctatataagaagcactcacttcctacctttgagtttaactagcatgtcgattcagtaggcatagtctgatatgacatatctatatcggtattctccttctgagattacgtattctgtccactcaaccaggtcctgattgtatattgtttacaattgcttaactattgtgagtaatataagtagatatagcttcactagcactacataatgctatgttatgatctttgaatatttatagttatatttcccctttccccagtctcatattacatccttggcttatgaaggagctcagcatgaaaaagaatgtattctcagagatcgtacataacctcccggcactagcgggagagcggagcataggagcctatcaaacgtatccactaagaatgaatagcttcaataatacacccactttaatacaattgttttcgtcctcaaggcctaagacctcggatgctccgcaatgatagatggcagttgacagtgttattgtatccatatgtagtgaatttacccacatcagaatttggaacatagcactaggacggggatcatccatttgagatcaagattagaccgacgacagggctagaactgacctgtctccccacatttggtactagacacacggaagatgaaccgagtatgtatatattatggggcgaatgaggtacattgctgggggcgagggcatatagttggactaagcatcacgctcccaacaagcatactactacacggtagcaaactgaaaaggattgaacatgaatgaactactacccttgaatttttgggatcatgtctgagactggctacgcgtagctaaacgccggttcaaatctgtcatacatatttgaacttttttcttttcctatgaccagaagacaatgatttgcccaggctgaccagtacgtgacaccacttcattgacataacctttaaacattctcgaggacggtctccttgaactcccgctcaaccttctggcccttgtcatcagtggcggactctccgtgcagagacaggagagcaccgaggtcgaacttgggagacttcaggagcttaaccttgcgaatgtggacctgtagacatgtgttagcaatccgtgcgtatgccactctccaggttttgtggggggaaaaacgaacattctgcagggggtagatgccctgggtggacttctcgatctcacgtccaataacctcggggatgagcttgtgggtgagctgagacagagtgcaggtggaagcctcgcgctgaatgatctcggtcatcttcttgcgaatggcacggatctgggacgaagcggcgtaggtggtcttcttgatctggttggggcgtctcttggtgaaggcaatggcgaacaggcggaggaggtagtcgtcagtggtcttcacggtgatgttggcctcaatcagagtctgccacttgcggacaagagaacggagcttgtcggtggtgaagtcgagaccgtggaagttggtcaggcagttcttgccctggatctcgtcgacgcggagcttgaccttgcggaaggcgtggtcctcatcgttctggaggtcggcgagggagacctcgaagatacggcccttgagggagtcgttggcgttcttcaaaccgctggtgcggttgaccagagtcttgccgacactgataattccgttagccaatccaactctaaattcgccatgttcgattcgggtggtgtgcatactcgcgagtctggaaggtggaaggagcctgtcgacacgattagcattgggtacgggacgggggaaggaatataacgaaccttcacagagtactcgtccttgcgagtgaaggggtcgactgtgcgcttcttgatacccttcttacccttagataggcgcttgttcctgaacgatgaggattagccgtgtgttcgtgaattgaatggatgtcgtagatgcgcaagtaattcgataaattgaaagcaggaaaaggatggagagtagggcgcttactttccaacagccatgattgcgagttatctgtgtgttgttggaggacagacaaaggtatcgcaccgcgcgctcagagggtttcgacactcgactgggagggttgaaaacccacagaaaactcggctaagcgaggcgcgggccctagctgattatgtcatgaaccatcgtcatgtgatcgaacattaaaaaaaggttccactggattatcattatgtaatcacattatgtcatcatcgtgagtcgggccattgcattgcattacagtaacattcatacttgtcagatcactttgcgttgtattattacaagaatgtactccgtagattgttggctgttacaatagcgttcgtttgaaatgctatacactctacatgtgtatacatacttgtatgcctatgtatcagatttttgccaaaaccaatcctctttcctccaatccgcatcgagtcctccaaagtttcgaatagccaacatagaaatttccattcaatattctattgttttatataatgtagatcacttcgtggaaatcgccactaactgacatcacctatcggaagctggagacttattgttccgactccaaactaggcaagtcgccttggcatccattccgcgggcctactcccgcgcgagtcaacgctcctcattgcttcaactttcctctcatcccttcttatatttcaactttgtcgcaggttaagccaatcatggtacgtgctatcgaatttccttccccgactgccctgacccgcccgacccccccgaccgtggatagatgttaatttaaacagggcaagcgcaagaagtcaagctccaagccccaagggcctaagaaggtaaacgattcacaagtcgccaggctttacacccagtactgactgtgaaacatagagggagcctcttgctaccacattctcctgtctcttttgcaaccatgagaactctgtggtcgtcaagctagacaagaagcttggccttggcgatctatcgtgcaaagtttgtggtcaaaagttccaaaccggtatcaattgtgagtcgataattcggcctaaggcatcagtcgtaactggtttgactaacacaatgcttcaaagatctttctgctcccgtggatgtgtattcagattgggtagatgcatgtgatgcagttgcgaaggacactgccaatcagtatgatgcaccggtttctagtcacttgggacagagagggatcagcaagcagggcatatctggagagactgggcaggacgatggctacgatgatgatgaatactgatcatgggatgacggcgaacggcgcattaaggcacgatatcaacaatagtcgagttgtgagattcttgtatgtacacggtatttgatattcttgcggcatattcttgttgcatatgtttatcatatagcctaaaccccaagaagcgtctcacccatctagacctctaccccactaccggccatcaagtcaactctgaataggtgacttgtatgggaagtggaagtgccttacggcacctggaacagaccaagcaatggatggataatggaatactgaatttctcagaatttccgggtgaccttttaaccatcaacgtggtaggaaacatgacttttacatagagtaatatctgtcgccgaaatctcccaggccggggataatatacctatcaatcagtcagcatgtcaatcacaacatccaaggggtgcgatattctcacttcttctcatccaatccttgatcaatgaaagaggtcacaacccgaagtttagggaatctctccgcgaactcagcaacgcccgacgggctggcaatgaggttaaggaataggatccggtgttcagggacgcctctctcgatcagtgtctccacggccaatgttgcggaaccacctaggaaaaaaatcagctgggtggcaaggggcattgtacaacaagctcagctcaccagttgcaaacatggggtcgaggagaaggacccatcgatcagcaatgtcagtagggagcttatcgtaaaacagtttgggcatgcaagtttcctcgtcccgctggatgaggattttcccaatgcgaacagatcggcagcagtcgcgcaatccttgttccatggcctcgcctgcacgcatgatcgacacaccacagatctttccttcgaatttgacaccgaggtaggaccgtccaacgggggtagtgatagactgctcaacaacgggaaggtggttcaagccttcctccaccagcaatcgaatgatgcggttagaatagaagatgaaatcggcacggcaggttctcttatctctgatcatcctatttgtagtacaaaacatgagtctagggttaccttccatgtagaaatgggtcctcacgtcaagagagcaatcaactggggtgtttgaggtagcacgtgcacattctcgtaggagacttcctttgagactgtcgcagtgggcttctcgccatcgggccgatacaaaggaccaacgccctgtgcaggagaaggaccgctctcgggtttgctagccatgattttgttgcgtccaaagatgtgtgtgcgtgtgtgtatgtgggtcgtaggactagaacaaagagaaaaaagattggagtacgcaagttcacctaagacaagtacaagtagctcaaagtagaaggacaagagtccagagaggggtatataaggacagtgagttgtctcaaagccaagagcggggaagcagagggttttcttatcttttttgctatatctggaagctataccgcagtgggtgattctgccccatctcacccccctcggcctcttatcacctgcatcatctccccaatcaaacccccagacctcggatgtgctcaattattctattacgcgatcttctcaaaggaaattgcctaggtaatctacgcgcctcattgccaatcacctaggggtcactcctttgatgactgtgccacaccctttgggcgtgtgtaagcttcattgaacacgcaaggacatggctgtttcaagaaacgactacgttttactcaatccaataacccaattgcccatcgccaaaccttgattgccctctgagaaacgtatttcgccatcgaattcatcaaacaacgcgtgcgcatctggtttcgcacggtttgtgaaccgaagatggagaactcacaccctcgcaatcgacgactcgtaacctacggctctgctgccaaaagccaacccccgttgaataacgaaaggcctgtacactcatctgccgctaaaacaactcctaaagatatgcctttgcccaagtcgtcacgtctctcacggcccttccacaccaggttacagcgcgacaagaatggagataaacaaccgtctggatcggaaaaaatgaccacgacgcgaagtcttacgcaatcaaaacctatcatggaacctaatgtgtatgacttgccctcttcagacgatgaacatatgtctatggtccagagaaagcgaaggcgatatagccccgatggaaacaaagccattcctgtgacgaagccatccgtgaagccaaatgagacagaaatgagagatcgtaaggtgtcaccacaaatggagaagagggttcccaatagtcggtggccattagccaaaaagccagaagccgatcagcagacaaaccccgcggggtcaacgtcgtattcaagggctaggaggtctgtgcggaaccagaccaaggtatctactctcgagaatgaaatggaaatttcaaccgaagggagctttggggacggagagtccgtgcgaaagagctcaccggacgtcaaccagggctatgccactaaagcgaacaccacccctggtcgaaggaggctgattgattcgctcgggatcacggaacacacggttgaaacatctccagcgattgaaacatcaccggagagtccctctagtagtcagccgtctcgagatccagcccccgttgaccgagcttcgccaagtgcagctgtgaatgagtgtcctgccgaaagccaaattcaaggatctcctgcctcggtgccatctcatttacgaggttcccgcgtcacctatgcccgccagcgttcttttttggatgacatggttatgtcagaggacccttctatgcaggatgctccctctggcccaaagcaccgctctcagtctgtccaacgtcagttgaattacgaggctacttccagtgcccgtttaatcgtgccaattgaggataccaacgaggatggatctgtccgaagtattcatgagctcagacaagctgggggaaacgctcgttaccgaggcgccgtcgaatctatctttgaggatatcgaagatccgcaaaactcattgacgggtcgatgcaatgcaattctccaactgtgtggtaaacttctggatactggtctcagacggcggtttgtcgagtgcaattttgacaaaaggcttgtggattgtctatctatggatcttcaagtggtccccactattctagctttctgtgcctacgcactgggatcatcggatgggcacatgtcttatgttcttgcaacttccgcatggcctaagctcctgagtgcttcgcctgccttattgggcatgcaagacgatatactagtgaccgcaagagctaaagccagcggccttccccggcacttgcaaaatacaatccagggcactattccacagatatccgctgtgctttttcccgataccgcatcgtcgaagctgtccccatgcactctggcgttgtattgcctgaggtcgacgatctccacgatgcaaaccaagggaaagaaccctagcctctccacatctcttctgaaacctttggttcaagtgctcgtgtccgaaagccagcgttgtgtttcattggaaaaattacacccggagagctctcaaatactgtgcatgggcttttcaatcttggaagcttctactgcattggctgaatcgctcacaaaagagcaatgggatattctaggtccgctctctgaacttcatagcctgctctccttggagtcgggcactgtcagccaaatacaacccctttacattcgacttatcttgaatgtgaccaacagcaacccctccttctgtgatagatttgcaaactcggagatagttggggggctagtccggattgtctctgcgaactttggtgacttgaccgaagatgcgcttggacaagcgaataattctctggacagcgtgatattggcgctcggcgcacttatcaatcttactgaacagagtgaagcatcaagaacgatttttcttcactctgctggttcctcgaagcctttccttgatcaattgttgcatttattcatgactcatgtcgattccatctccacggtaagcttttgatcttttttgatttcgcattttgccgacgcattgaactaactggatctgcttaggctcattcggtcttggaagtacaccacaatgttgccgtgggatatttggccgtcctgttacttacactcaatttggatcctgatacccgatccaaaatcaagagctcactcgctcctaatggattagcagtggtgatatctaccgttgatgaattcctgcaataccatcagaagattgaacaagaaacctccactttcccaactcaaggacaaccggcgagtggtttcttatccagattacaagaacttgtcactcggattcggttggcagagcaatgaggagcgtctatccatgttttgcttgacggcagataagtgcgcgcttggtcttcttctaccggcatttcttcagactcgatgacgtggatttcttggtctgctggcagcttttgataccccttccatcatcacttttaattgaaccatttacgctgaaatgtcctacattcaatatccacctgggcagatgtccatcattgagatcgtcgtaagataatgacctcaggtcaaaccagacctcaatgttcaaaaaaagtaggattcagtagtttttctaatacagtaattttataaagaatatcaaatcgatggtcatagaccctgtggacctacacgtaggcaattatttatagagcgctcagccctgcctaagtggagttggagaaactgccgtttgcattgtttgcaggtcacaaggagttggagctccgcatgcttcgagggatttgccaccccccggcgacctcgtttctgaacatgtgtctctgaatatctcattgatccagttccatcaatcaaaagatactgtctatctgactttatcatcatcaatatctctcattcacattggtggtctagctgaatcttaccgcactacacaagatgccttccgcgcctaagcagagaaagatcgcaatcgttggcagtcgctccgtgggtaagaaagagcacctttttcacaacccaaatctctgtaattgcgaagagctaacacttatcttggataggaaaatcttccctcacggttcgctttgtcgagcaccacttcgtggaaagctactaccctacaattgagaacacattcagccggattatcaagcacaatggccaggactacgccactgagatcgtcgacactgcggggcaggtaggtgaaccctgtgcgagattaccggctgtttactgagactattcattctacaggacgagtatagtatcttgaactccaagcatttcattggaattcatggatatatcatcgtctattcagtggcatcgcgccagtcatttgacatggtccgggtgattcgtgacaagatcctgaaccacctcgtcagtcactgccgttctcacaaccagtacttacgaaccagcgtctaatatttcctatttcctctagggagcggatgatgtacctcttgtcatagtaggaaacaagagtgatctcaaacccgatcaccgccaagtcaccctcgaagacggacgtcagttagcggaggagcttcactgtgctttcaccgaggctagcgccttccttgatttcaatgtctcgaaggcctttgacctcatgatcggagaggtcgagaagtctcagaacccctcccaaccaaccggcgacaacaagtgcgctgtgatgtaatacgggagccttctaccggaacgcgtgtgtctctctcccggggatggtaagcgaagccatctctggatctctggatccatgagtcaagaaacgtggagatctctttcatcggagctgacaacactatatcttgctcttttgatgtccacccaattcagatctacggatatcttgtttgctaactcgattattgacttagagatcatcaacgccaatttgataacaagcttgatggcttcttctcgaggccttcctcttctctttggccctatttctattgcgtctttctgaaccaccggggttattgcatgaataatgagttttagggtcgaattatggaacatggatcggtaccatgcatagagtaatgaatctcaattgaaacaggcttctcgaagtattcaaagtgttgaatctcttgatctatagaaccatccgtggccataactagcctgttcggaagtaaaccggggaacccttatcgattaagtaatgcgaccccttgaggcccaagtgcgtggaggcacgcactttgattttcctcgtttttacccctccacaatttgagtcacccctctaccacttagactcccctgaacctctgaactccaatcgtcaatatgctggacctcgccgactttgtcactgagcgcggtggtgatatcaagaagatcaaggagagccagcagaagcgatttgctccagaggagaccgttgatgaagttgtcgcgctctatgaagaggcacgacgcggtatgatttctatttttttaaaagactagcgaaatcttactgacaggtacagcccgatatgaggtcacacagttcggttctcaaatcaatggagtccagaaggcaattggaatgaagaagaaggtaggcattttctagctagtctagagtatggggagatgcttatgcgttctcagaacaaggaagacgcaaccgaattgctcgcacaaaaggcagagcttgagattaagaagaaggagcttgaggaaactgctgtcgccaaggagcttcaacgcgaccgaaagattcgcacgattggaaactacgtccacgaatccgtgcccgtgagcaacgatgaggtatgggttatcaagtcgcctgggaattgaatgcgctgtgagactaacaagtctatttctggctacaggcagacaaccagctgatcaaaacatggacccccgagaacgccgaaatgcagaagccaggttgcctctcccaccacgaagtgttgactcgtctcgatggatatgacccagagcgtggtgtcaagattgttggtcaccgtggatactgcttgactggatacggtcttttcctcaacttggctttggtcaactatggtctggagttcctcttcaacaagggctacacgcccaatcagccccctcaattcatgctcaaggatctcatggcgaagactgcgcagctcgagcaattcgacgaagagttgtataaggttaccgagagcgaggataagtcgaccgataagtacctcattgctacctccgaacaaccattgtctgccctgcacgacagcgagtggctccaggacaaggaactacccattaagtaagccactcatctcgcacaggactaagcccttttgctgataagagaaacaggtatgccggttacagcacatgctaccgcaaggaggctggatctcacggcaaagatgcctggggcatcttccgtgttcaccaattcgaaaaggttagcatagatccaaatgccctggattttcgtgttctaaccccatgcagattgagcagttcgttcttactaagcccgaggattcatggcaagcctttgaggacatgatcagcacttctgaagaattctaccagtccctaaaactcccttacaacattgtcgccattgtctccggcgccttgaacaatgcagcatccaagaagtacgacttggaggcctggttcccattccagcaggagtacaaggagctcgtctcttgctccaactgtaccgactaccagtcccgcgctctggagatccggtacggcgtgaagaagaccaccgatctgaagaaaacctatgtccatgcgctgaactccaccctgtgcgcgacggagcgtactctctgctgtgtgctcgagaactaccagaaagaagatgtaagtgtcgaaaggtcaccgggtgaatctgacagtagctaactatcatttagggtatcgtggtcccagaggtcctgcggaaatacattcccggtgctcctgagttcctcccttacaccaaggagcttcccaaggatagcacatccaccaaggccaaggggaaggccagcaagggcaccgatgatgccaccaaaaagatgcaaggtcttcaggtttaaggagatatcccacgatgtaccttgagatacaaattacaaattacgatggtttagttcatgatttacaggcatacgtacacaggaatagtcggccctgcatcctgcctctgtccttgacaacgtagggctttgataatctgatctatttgacaaaggatgcatatattaaggatttttctatttaagaagactccagaagaatccctacaacatagttgatttaacaaagacattcaaaaagctatcccgaagatcatattaacctaaatgaatcaaatataaaaagctctctagactgtgtgttttctggaaggaaggcatcggctaagtcccctgatccaaacttctcctttgaagctaacgcaagttcaatcctcttttctatactgtgtcattcctccatggaagtcaaaactcaaggccaaagacaggttaaggagcaaggactcagaattgtgagtgagggtaagaagaatctgccacaaaatgtagtatatagggtgaaaaaggcgtaaaatgtgattcagatcttaaatattattctgaattagatagccaaagcagcaacataatataactagcaaacaaaccaatataacaacactggagttcacaaatatcgagcaattgtaggacttggctccaaactgcaagcaattttcaaaactcgaatcacttggagcctctttccaaccgccaagggaatgcctttttccaataccacactactgatctcatcgttgtcagctttccaagcccaaatatacccggcttagagaaataggcctctgtcattgttaaaagatgggagggattttcgctgttcaagccatcctccaaatcttcctcctcggttactggatgaccacgagtagcttcacagcaccaacactcagtcgtacagtgcccgatacccctgcccttagctagacagcgcttttcgcaacagccacagcttcgaccacagcagccacccctcctcatacaagcctgaataagctcttttcgaagataccaagcagggttctgtcggatctcatcatatatctttctcaacggtctttggggaagcatactttccgtattgtataaggcctgtgctatgttccacgtaacctctttgatatcctcgaggtcgctctcatatacttgaatttcgtccttggtgggatcttctagtgatctaaagtccttttctaaccgttcatgggatttgtctggtcactcgtgaaaaatattcgagttgtatgatcgtcgcaaagagcctcgaaggtatttgaagacccctgccgtactcaaagagtcgcttgttctcgtcttggtaattccgaacaggcttgaagtttccaaaggaatcgaacatttgtaacggatctaatcccagcaacgagattttcggcatggtcttgcggtccgccatgttctaagtcatgttagtatgattgtcacgtagataaaggtgggaactatttacgaacattggattcgagtacggagtagctgcaagttgtgagttatatctaggtaaactcgtgagttgattttcaatctaccggtaaatactacatcatctttcgccgcccttgcctaaagcagataagctcatgcaataaacatgtgatctgcatgtgattagtcaaaactttgaattaaaaaaaagaaaaagtctttgccccgcggtgcccctccataggatacagagagaacagagagattatatgcagaatagtatatctcaacatctatttaattatataaatagaatcaatcgatagtaatagctatatgaagtcagtgtaggtatgtagtgcaaatggtaagtccccgaaaccaaaaaaatcatcaagtccgattccggagaccttggaggcttacttaatttctattaagagtcatcccatatgaatcatatccccatcctcctcttccctgcttctttctcttcaatctgctacaatctgctacacacttcaatcatgtcaatcgcaagagatatccgtcctcgtcaggacgattccttcctcgctacctcccccaacgcctccttccactccccatccagccacagctctgtcctgaaccgtacaattccagtcaatgctaagcctctgaagccattcgccacagaagatatcaaggtcctgctcttggagaatgtcaaccaaactggccgtgatatcctgtcccagcaaggctaccaggtggaattcctgaagtcttcactctcggaggatcagctcattgagaagattcggtgagtcgcaatttaactctctatcggtgactcacttggctcatgaattctgttgcctttcagggatgtccacgtcattggtattcgctctaagacaaagctcaccgcacgagtcttgaaggaagcaaagaacctgatcgtcatcggttgcttctgtatcggtaccaaccaggtcgacctccaatatgccgccgaccagggtattgcggtcttcaactcccccttcagcaactctcgcagtgttgccgagttggtcattggcgagatggtcatgcttgcacgtcaattgggcgaccgctccaacgagatgcacgctggtacttggaacaaagtgagcaacggttgctgggagattcgaggaaagaccatcggtatgtggcattcttacaaccattctgttgttgggttgtttagctgacttttcaggtatcattggatacggtcacattggtgcccagctgtccgtattggctgaggcaatgggcatgtcagtcatctactacgatgttctcaacataatgtcattgggcactgctcgccaggtgaagaccttggatgatctcttggccgaggctgatttcattacctgccacgtccccgagattgccgagaccaagggcatgattggacagccgcagttcgagaagatgaagaagggaagctacttgatcaacgccagccgaggaaccgttgtggatatccccgcactgatcgatgccatgcgcagcggtaaggttgctggtgccgctctggatgtctatcccaatgagcccgccggaaacggtgactacttcaacagcgagctgaacccatggggggctgacctgcgctcgctcaaaaaccttattctgacccctcatatcggaggaagtaccgaagaggcgcagaaggctattggtgtcgaggttgcccaggctctggtccgatatgctaacgagggttcgacccttggtgctgtcaacttgcccgaggttttcctccgttccttgacaatggatgagcctgaccacgctcgtgtaagttttctcgcgcagtcagtcgggtttgcaatgatactgatttggcctaggtgatctacatccacaagaacattcctggagtgttgagaaaaggtagagtacatttgattcgaatgctgtgatctttttaactaacaatgccacagtcaacgagattattggtgaccacaacgtcgacaagcagatgactgacagcagaggcgatgtaggtttatccgtgtttctcatacaaaaacccacgcagaaacttactgttaataggttgcctacctgatggccgatattagcaatgtggacgctgctaccatcaaggatttgtataccagactcgagagccttccttgtaagactacatcctttctctttcgcatgaacttaaaagctaacaccacttcagctcgcatcatgacccgcgtgttgtactaaacaaccgattcaaaaacaagctagcccccgggctataatgctttaatcaacttaagactgatgaaccctataggggctcaatctcaattgcatgggacactctcaacgaggccctgggatactacaaggttgcaattgccaactccttagtataccgagttggatacgactgatgtaaaagcggtttagtgtatattttgtgattaccacgcaccatctactagagaaaaagctatgacatgaatgttttcattttcattttcatctgccatctgactggctcagtaaaatacattaagtgaaagctcgctagatatcatgaccctagcctcgactcccatctctgaatccgggactgcggctccttcttcgggatggaggatcccggcggtaatcacgtcgacctgtcgagcgccaatcggcgtttgaatgcgagccatgctcaccagagtctcgcgagcgatcgttgccgcggtcgccgcgctcaccgcggtcactgccacggtcacggtcactattgctgtagttaggaacgtaagagtccaggttccctggtctgggtcctgggcgcccttgtccggattgatttcggcgatcgtctctcccatcaggtctgttggactgcggtacttcccacggcgggcgggttggtacgggaggacgcgggggtaatccgatatctcgttgtgtaggtgggaaaggcccgcggcgttgcgggtttccgtgaggtgggtggtgtccatgatttcctggcatatttggtctgcctccacgaggggggccggggatgcggccatgtcgggagtctgctccgcgagaaccagagcttggccaagcgccgttgcttgagtcggaaacgggtgggggaactgggggcattggcacgcgctggctgcggaacttctttcggtcgagttcgtgggaatctgcgaattgggggatttcgccgggtcgcgctgggagtgggggcgtggtgaagtatgggtgcttcaatgcatccatggcgttgatgcgtttccgccagtctaatttgaggaattcgcttaatagagaaatagcggccgggtttaggctgttacatcgttagttaggggcccacatcgtcgagggaaaagtaacatactccttgaagactccgtggaggttcccacgtttgtaggcgaagtttttcacaccctcacaacccgggagttgactccatccgggcatattctcctcggtgggagtgcccacaagattgaatatcagttctgcttggttaagatcgctgtttccagcaaggatgggcttgcccttgaacatctcgccaaagacacatctatagaatattagaaaatgataagcctggctaatagggatggaaagcttacccaactccccacaagtcgatagcagtagtgtatttccgcagctgtagcagcaactccggaggacggtaccatctcgtgacaacaagtgcagtgtattctcttttggaatctccacctccttttccgggtaatggaggggcatcatcgtagggccgagcaagaccaaaatcagcgatttggagaattcctccattgctaattagcaggttcgccgctatttattctgttagctcggaatcatggtatatcagcattcaacacccacctttcatatcacgatgtaggatgcggttctgtgaaattgttagacaaatattgcaaggaaacgtgtttcaagatgatcgtactgcgtgcatgaacttgagcccttcgaggagttgcatcaagtagcatttgatctgtggttcggtgaattgaactgccgggttttccaggagcccagacaggtcatgttccatgtatggaaataccatgtacatgctcggctttttccgcccttcgcctttgcctcgctcgattgacatctccttgagctgcaaaatgtttgggtggcagagtgccttcatgagtttgatctctcggatggcggtaatagggaactagcccaaatgtcaatatatagctaataaagaacaaagagcttgtgaacttacgccttctttctcgtgatgcatgaggatctttttcaaggccacaattttggtgtccttcttagaccttgctttgtagacctctctattaaccggtcagacggtttcttgcagttataacgctgccgaactcacccgaatgttccttctccaagcttgtcaaggaattcataatcacggatgtgcgaacaaccagggaaacgggcctggccattctcgtacttttccagagatttaatctccatgctgactcgtcgcttgagctggtcgcccaccccggtgggggaagaaagagctatctgatgcttgtgtcaaaattatcgaccgtcgtcaagctctgcggtatgctttggtttgatgttgtgttcaggtacacggaggagggttcgagaagtcttcggcgacagatgattgtgggaaaagtgtcaagatgaatcagcggggaccttgtcggagagagccacgcgcgtcgagtgtgttataagacaagtccatatcatagtacaaagcatgtgtgacgagttcgcattgttcaaagcccgcgcgtggggagctcggccacgcaggaggctcaatataaacctgagtaggaaccagcccagtcaaggtataggcgaaataggagtcagacgactcttcaataacgatatagattattgttctgctgcttgtccttgcgaacaacccaaacactgcgctgcggtggaattcgagtgccgtcacgggtcacgtgctaccaacctctccgttccccgttgaaccgcagaaccctctgtcttcagatccgattcgagattggcgttctgtgaacaaacaacagccatttccagcacacagtacgtcttgcatgcacctttctctgttcatgtgaatctgtggaaactaatttctttccaatctacacagtcatggcgggcaactcctcccaccctatccacatccacccggtccgaccgctctaccgcttcactgcgactgcattgggcgcgagcatgtggttcttcgtaaggatcgcctccttttgacatggagacctcgtactgacaggacttctgcgcagctcatgtaccgggccaagaaggatggtcccgctctgttgggctggaagcacccttgggaccactgatccgaatataatcgtcgatttcatttttattgcgcaaccgcttttgtccctcggggcagcggtgatagttgggtcgcattgcgtactgtgtacttggactaggtagagaggaacagcgagccgggtgttaccgagcgcatgtcaaagccacaagttcacgatagctatttaccagccgaattgtatcataccctttcttttcaattttctgaaatggtaaactatggcctgagtgattgggacggagcctcattagatagatgactagatccagattatgacaatctaaatgtctatagttatgtacaagaatagtcggccgcatttgcggcctatgtcattgaaaaagtcatgatccagttgacccgacggtggtctttcttagtctttcaagaagctattttgtatggatatcccctccccttcctagttttgtgggtagacggcagaaaaggacgggaaacgacctccctatgtaaaacctttggtttgatagcgtacaacgtgaatgcgttgataacgtacttcataggcgcagtccctccaacagcactttgtacatcttgcgcttcttgcggtagttttgctgcaagcgggcacgagtatgtccaagtatctgtgccacgcgagggaatatggtcttctctgctgtccaggacaaaacgaagattccgaatgctagcgcaagtagccaggacttgaaaccatcagacatgaaagtcagttgcatcacctccgacacccagttagatggtctaaagagcatatagcccgagaccaagatgttgacgatgatcgtacataagtacggcactaaacgatcatagtcagtatctagatgagcaagaaggggaagttagtggtgtgcttcttaccattctgagtcattggtttccggaatggcggacccgcactcagaacaatgctgatgaagatgtactggaaacaggaaaacaagaacaaagaagtattctctgaattgagaatgttgctcttttctttgtccaattgtggcggcaagaacctgcattgtttgttagaataattttaatgggtatattgtaacggttactgaccatggctgtaattgaacggtctggaaaactgcaaattgcgacagcacaactagcaagatctgcccgagcaaaggtgtcaataccttacgggaaacaagatcagcagttggccgtttccgagacatcgtgggagcaggatcagcccagcccactagaatgaaattagctcgaggactcagattttaggagagagaccactcactgaagaccgcaatgggcataatgagcagaagatcgataaagaggaacttgaggccattagcgatatatcaaaactgttggtaataagcccacttacctggaaatcaccaagatttgaccccgacgtgtacaggaagctgaccgaggagaattgaatggcggaataaagactcatgaacttgaaacaggagaaacttgtcaccagcgcagctcgaccttccctgatcaccgtcggaacacaagagatttcgaacacgcggctagtaaagggtgcggcaacggacgcctcggcgtccgacagtgaaataccaacatctgcggccttcagagcgccacaatcattggcaccatcaccgcaaaagccacagcagtaatcaatagactgaagtttctcaactagttcgtgcttctcgtccggggacatacgggcaaacactttgccgcatacaagtacctatacagtacacattagttcgacgcatggtaaaaaatggtaatggttagtacaacggctgcttaccttgttgagtacatcttcattcccgaagtcaaccaaccatctaaaggcatcacccgtgacagcaacagagtattcacgctcggtgaaaacgtttcctggaattgacatgtcgacctccgcgtcgttgagtggctgcaattccattagctgctaataattggatatagggaaaatatatcttaccaagagtgttcttgggtccaagcggaggtcggagttgtccacgcattcccatatgagagaagctttaggtgcaagaccaggcgctggagatcgttaatactgagctatggcatggattcggtaaacaaaccttcgataaagtgcgggataaagcatagctcatcacgtccaagcatgttgcattcacgagcaacactgatggcagtcaagatgttatcaccggtgcacattacattgcgaatccccgcctcgttcaactcggaaatcacaccggcagtactgggcttcaacttattctcgaatatgatgaagcccaagaattccaggtcagattcggcttccgtccgagacattttttggacttttctccagctcaattttggttcatatttggaagcacaggcaatcacacggtatcccttgtgagtgtagtaattcaggagatcttcataatccgaaggaactgcaaaagaagtatatcagcaatgcaagcttatatagagagcgtagaaagcactgacgagttccaggaatacatatgtccataatgctttctggagcacccttgacaaagaaacttgctccgttgtcgccaaatttcctgacaacgacacttgcgcggcgaagattggagacaaattcgaaactccgcagaactccaagctcgagtgggttctgaatattgttagccatcaagttgtggcttgaatataaatcaactcacatttacatcaccattagtctgtccttgaggaggctttgcaactgacggcgctatagtgtcatatttggggcttgtctggtcagaaatatgatcccctccctcctcaaacgtccagttggtaaattgaaacatcttgacatcgagaggatctcccaacagctcattgtccactaccctaagggaatgacacgtagccatggcgtacatgatcttcctttgctttttgatatcgtattcggagttagcatcgggggaaggacgaagaaacccgtcattcgtctcagagagcaagtctgaaaatctagagattcatcttcagcgccggcttaagggtcatacttaggaacagacaaacctattggcacgggtgactatacgcattcctaggacatccagtccgtcttctgtgagggttcctgttttatcaaaacaaacaatgtccagctttcctcccacgttgaccctgttctcacgtattagcgtcgaagttaagacattattcatcggaggtcactcacttctgtgggctgatacagaatatgttctgtttcttcagtcgtgaaagtgcaaaattggttccgatggtgagtgtggctgggagagctggcggtacaacaatcgtgatcagatcgagggctcgaattatgatcagatgccaagcgagctatatttcgttgcatcagcggccaacataaccttaggaaaatcgtcgttccgagcattaacttacacccaatcgaacaaagttaatgaatgaagcaacgaatccgatgagagcgacaatccccatcacggcgatgtagcggaacgagtctcggtagaacttgaatccagagggtttcggaaaaagcatcgatcgaactagagcccccttggttgtcgaaaagccagttctcatgacaattgccaatgctactgcttcatcgtcatcaacattctggggtcgtctagcccggattactttggttccgctgaagaggaagtgtttagcaacatgggggtggatagaaggggtactgagatcgagatattggatggcgtcatcggtgagtggtgttttagacacagggacggattcacctggtcaagttagatgtatgcatcaatactgagggtttttacgaaccagtgagcatgctctcattcacaatgcagtcacctgacaacaagatacagtcacacgggacctggtgaagcgatgggtcggaaaattcataaacatcaccaggaactagttcttgggaggaaacggaccgccctgtatatacaatcagtttacattcggtgagatgatgcatcgaacaaactcacagaatccacttcttagaacgcgaacatcacactcgaaaagagatatctccctgagccgactcatagtctatagtagcgttagtttcagataatggtcccattcttgggctgaacgcactgatttcgtctctagcacagtcgttgctatgctgaaaaacgatataagaaagatacagacggcgtagtagtagtactcatccatggaccacagaacgagacttgcaatctggaagatataaaaaggatgaaatgcctatacactgtcagatatattgatggaacaactagaaggaaaactgacctcgtcgacgagaagctgaggaattgtctttgcatcaatttcgatgtcgttacttccgaatatctgttccctgctgtctcgttcatcggcatctaatccacttcgcatgactttggcattagtccacgaaggatctttccagccgcttatcaagcaaaatttatcctcgattggatgatagaagaacttcagatatcgatagtcgatgaagtgcagagaggtaatagtcgggtcattatcttcatcgtaggtgtgattcagtgagtcggcgaagaccgtggaaagcggacgtccataaggctggctgccaactttgtggatggtgaattggttccattggtcctaccatgataccatggtcagatggttaatgtatgggattgaagttcacaatcttacctcaatagccacccattggcattttcctaatggggttgccttcccaactaactttacccgccatcgtggcagccatcggaagagaagccaggcaaatccaccggtcaagatgcaaagggcaatatagacagcaaaccctcctgaactcgtggagaacccagcaaagacagccgtcaaatcttccgaggcgagatagactttttgattcaaccgactgccggatcgtcggtctcggccatatgagctggcggacaggtagcgagaaagaagtggatgttcaaccgagtcgcgggaggtagacatccgcttagacacaaaggatcccctgactgactcaacatctgcatccccaatgccgtgtaaagattcttcatcaagctcgctttgctcgtccactgcagattcgttcgacaattctgcgaagtcttccccgtcctggaagtatgtaaagctcaccgtagagcctgctcggttacggcggtgcgcgaacgaggcgacgcttgaagggatgctttccgagatcgggccatcgaagacctagtgcgagtcagatcctgcgctgaagtctgcacgtgagaatggagatttgacatacctcattacgggccatctccacatccgacacggcgctcacactagagaagtatcagcagggattgaagggttgatttgggtaggaagggagcatagcaacctgcttcgcatggaatcgcgtcgcattctgtttcgaggcatagataggtccacaggaccagtccccgagggagagtgcggacggggcatgtttaagaggtcaactcggccgattcacaaagccaatagccttgcagagtgtcgtattatggggctttcgtaaagtcgtatttcaccgacactggaccgaaggaaaacatttatcgtagagcgcgagttcgcacaaaagcagggtgtgatctggagcttatcggcgtcccacagcggagagcgacttatctccatgtgactgtccgatagctttggcttactaattatatcggaccaaactttgaaatcccccatgcagggcatccatataaagttgtatacgataacggcttctatatgccattgtgtatattgacaaggttcgataacaatctagaagaacggatgagtcttggcatcttatgtctggactttaacggacatctcattggccactgaatcatcgacggggttttgatctggaatgatacaggaggatctacatagccctgctcaaggctccgaagtatttcaatccttgtgtatttacccaaatgacaaaaagtacctttgtacatcatcctacgcgagtcttgaacgtcatcgaatttcatgtagcctaggcaaaacaagcaacttgtccacgggtgtaaaatacccgtttctataaatatatatcgcctattcatgggggcgaatctcgtcctagacctattttcttaccaagcaatccaaaaaaaccacatatagcaggcgaatgggccaagaatcacagtcagatagaaataattcccagttccatagccatatttggaattggagagaggggtaatggtccaggacgccaccgggagcgatcagatcgaagatgatcacagaagacaagatatcaagactccttgacatggaaacgacaagatagaaggaataagaaagataaaataaagctgtgtccagcgtaacaaggcgcgacaaatcaaaagcgtatcaaaaaggtattgttgggagaatttgcagtctttgcaggctcaaccagaaccgtcccgccaagcccctcggccacagggcgctaaggatcccaccatcttccagactctcttcccccaaaactgaacgggtatcaaattcttccttctttctctctcctcacctcattccctctccctgccccttttcattccccgttcatcatgtctgagcccatcagaaataagaaggcggacttcccggtcgcaccgtaagcatcccccctcctcccgtttttttttcccacccttatcaaaagcaaaaaaaaaaaacatggatgctgacttgcagaaggaccccgcaaaacacgccggccaacaatgctcctatctcatctcacgcccagcagcctggtgtatccagcatcgaggagggtaagtcatctcttttctcgtattcaccgacatttctttgaccgtgctttctgttctagaaacctttgacaaagctacggctgcctcgctctttgctcgcaaccctgctttggtatccatgatccaaggcaagttgggtcaactcgtcggccgctcgtcaggctacatcgaatctctccccccctccgtccgccgccgtgtcgctggattgaagggtatccagaaggagcactccaagctcgaggcccagttccaagaggaggttctggaacttgagaagaagtacttcggcaagttcacgcccctgtaccagcgtcgttctactattatcaacggcggcatcgagccgaccgaggccgaggttgaggccggaaaggaggacgaggagagtgatgaggaggagactaaggaggagcccaagaaggaggagggcgaggccgcgaagggcatccccgaattctggctttctgccatgaagaaccaaatctcgctggctgagatgatcaccgagcgcgatgaggaggctctcaagcacctcaccgacattcgcatggagtaccttgaccgacccggattccgcctcattttcgagttctctgagaacgagttcttcaccaacaaaactatctccaagtcatacttctacaaggatgagagtggatacggtggcgatttcatttacgaccacgccgatggatcccagattgactggaaggaggaccaagacctgaccctccgcctggagagcaagaagcagcgcaacaagagtaagtccactcgaatattgagatgccatgttgaaactgacagctgacgctcctttagacaccaagcagacccgcgttgttaagatcagtgtgcctaccgagtccttcttcaacttcttctcacccccacagccacctgccgaggatgacgattcagtcgccagcgacattgaagagcgtctggagcttgattatcagctcggtgaggatattaaggagaagctcattccccgtgccattgactggttcaccggtgaagctctccagttcgaggagctcggtgaggatctggagggtgatgagtttgaggatgacgatgacgaggatgaggatgaagatgaggacgaggaggagctcgggtcagaccgtgaagtggacgaggaggacacagacgaagaggtatggcataccacactcaccgactcagatcacttgctaacttcgttccaggatggtacttccaagcccaagaaggaggccgccgagtgcaagcaaaactaaaccaaaaaaaagttgccggtggagaatgcccaacgtgagattactcgtactctctgatattttgctttgctttctgcctttttgtgcccccctgcgttgacctctctatcttctaatactcaatcaatacttgacataatcggtgtgtaattctcagttccggcgctgtaaggatttggacccatagctgagacccctggactgtcttataaaaggatagtctacgggtatgtggctattctggtatgtatgtatacttgatatccaataatcaggaggcaataccagagacgatacctacatgtaggtattaaacaagcctcaggtacaatacgactttctccttcataagtaatagtagcataactacggagtacatgtagtaaataggagtataatgtacatactagtacgtaaacataaggtacagtgtagaccaagtaggatggcggtgacaggctgtggggtgtgccgcccccccagtatattccctaagctccttcaggggctctcgctaaatggccagctgttagtctcactcaagggttttctttttcacctccatctaattcttatctccaatctttttattctattcttttgaaatatgagatgaggggttgagaaatccccctgtctttggactacctgtatcgccttgaaccttcgatgccctacctccgaaaacacccatcatccccggagcttctgcaaatatcccgcttttattgcatcaaaaacgattaacgacctacattccatatggcgcacacctatgaggtcggcacgcgggcctggcagcccgacccgacagaaggatggctggcatccgaggtgaaggagaagctggaggatggagagaaagtgcagctaatctttgagttggaaaacggagaggtaggtgcccttggaatactggacgcgggctgcgcagtcctgtctcttgagttttccggggttgctgacactgtcttgatcggggcagacaaaaacgttggagaccacgcaggccgagctgaagatcgataacaaccccaaactacctccgctcatgaaccctgctatgcttgaagcaagcgaagatctgacgaatttgtctcacctgaacgagcccgctggttagtcttgctcctacgtgtccagtgccaccctcattgctgacggccctttgaagtcctccaggctataaaactccgctatgctcagaaggagatatatacctacagtggtatcgttttgatcgcaaccaacccctttgcccgagtcgattcgttgtacgtgccgcagatggtgcaggtttatgctgggaaacaacgtgcctcgcaggcgcctcacctgttcgcgattgcggaggaagctttctcgtaagaatcgtccagctgttacatctctgaacttgatttcgcttacacttttgatacagtgacatgcttcgcgatggaaagaatcagacgattgtggtttctggtgaatccggagcgggtaagaccgtgagtgccaaatatatcatgcgctactttgcgactcgcgagtctcccgatcagcctggaaaatataccagcagccgcgcagatgcaatcagtgaaaccgaagagcagatcctagctactaacccggtcatggaagcgttcggtaacgccaaaaccactcgtaacgacaactcctcccgtttcggcaaatatatcgagatcatgttcgatgaccgaacgaacatcatcggagctaagatccggacctatcttcttgagcggtcaagactcgtcttccagcctctcaaagagcgcaattaccacatcttctaccagctggtagcgggtgcttctgacgcggagaaacaggatctgggtcccctggctgctgaagactttgagtatctcaaccaaggtggtactccagtaatcgacggtgttgatgacaaggccgaattcgaagcgactaggaagtcgctggctgtgattggtgtgccgcaggaagaccagacaggcatcttccgcgttctcgctgctttgctacacctcggcaatgtcaagatcacagctactcgcacggattcgtcagtttcgtcgaccgagcctgcacttatccgcgcgtgtgagatgcttggaatcgatgctacggagtttgcgaagtggatcgtgaagaagcaacttatcacgcgtggtgagaaaatcacctccaacttgacacaacaacaggccttggttgtccgagactccgtcgccaagtttatctattccagtctatttgattggctagtggagaagatcaaccgccgcctcgctactgatgaagtgcttgagcagttcaaatgcttcattggtgttcttgatatttacgggttcgaacatttcgccaagaactctttcgaacaattttgcatcaattatgccaacgagaagttgcaacaagaattcaaccagcatgtgttcaagcttgagcaggaagaatatgtccgagaagagatcgattggacattcattgacttttcggataaccaaccttgtatcgatcttattgaagcgaagctcggtgtcttggccctattggatgaagagtctcgacttcccatgggctcggatgagcagtttgtcatgaagcttcaccatcactttgccgctgacaagcaaaagttctacaagaaacctcgcttcgggaaatctgcattcaccgtctgtcactatgcagtcgatgttacttatgaatctgatggatttatcgagaagaaccgtgacactgtgccagacgagcatttggaagtgttgcgcaattcttccaatcctttcattaaggagattctagaaactgctgcggccgttcgtgagaaggactctgctgctatgtcatctaagccagttgcagcagctccagggcgtcggattggcgttgcggtcaatcgcaaacctacgcttggaggaatcttcaagtcttcgctgattgaattgatgcacaccatcaacaacacagaagttcattacatccgttgcatcaaacccaatgaggcaaaggaatcttggaaattcgaaggtcctatggttctcagtcagctgagagcttgtggtgtcctggaaactgtcagaatcagtactgctggctacccgacacgatggacttatgaggaatttgcggtccgttactacatgttgtgctattcctcgcaatggacctcggagattcgggatatgtgtcatgcaatccttcgaaaggccctgggagatgagaagcaagataagtatcaacttggtcttactaaaatcttcttccgagctggtatgcttgcattcctggagaacctccgaacgtccaggttgaacgaatgcgccattatgattcagaagaacttgcgtgccaagtattaccgccgccgctacctcgatgctcgtgactcaattctcaccactcaggccttcattcgaggtttcttggcacggcagcaggcccatgagattcgccggaccaaggctgctactaccatccagcgggtctggcgtggccagaaggagaagaagcggtacaatcaaatccgcaaaaacttcattctcttcgagtctattgccaagggattcctgtgccgacgcaacatcatggactctattaatggaaatgcggctaaggtcattcagcgtgctttccgctcctgggttcaaattcgagcctggagacagtatcgccgccatgttatcattatccaaaacctctggagaggaaaacaggcaagaaactcctacaagagacttcgtgaggatgcccgtgatcttaagcagatttcttacaagttggagaataaggtggttgagttgacccagtacttgcaatctcttaagcttgaaaataaaaccttggtttcacagctggaaaactacgatgcccaattgaagtcatggagaacccgacacaatgccttagatgctcgcacgaaggagctccaggttgaagcaaaccaggctggtatcaccgcggcccggttagaggcgattgaagaggagatgaaaaagcttcaacaaagccacactgaggctctggctaccatcaagcgcctccaagaagaggagaggatatcccgtgacgctcttacagtcgctgatggcgagttggggcgcctcaggctattggattctgaccatgagaaggataagactggtctccggcagcggatttccgatcttgaggaacagctcgagactgcgaagagatctgtgcctttgcacggcatgaacggcgatggtctatccaacggtggcgcagtcttgagcactgccccgggcttgatcaacctggtatcttcaaagaaacctaagcccaagagacgcagtgtcggtgccgagaggatcgagacggatcgcttcagtggtgcatacaaccctcggcctgtttcgatggcggtcacccctggatctatgatgtcccgtcaaaatgcagccatctctcctggtctagagtcggtcgagatggaactcgagaacctactttccgaagaggaagaattgaacgaggaagtcgccatgggtcttatccgcaacctgaagattccgctcccaacttcgacaccgcctccaactgaaaaggaagtcttgttcccagcatacttgattaaccttgttacgtcggagatgtggaacaacggatttgttaaggagtcggagcgattcttggccaacgttatgcagtctatccagcatgaagttatgcagcatgatggggacgacgcgatcaaccccggtgccttctggttatccaacgtgcacgaaatgctatcatttgtcttcctggccgaggattggtatgaagcacagaagaccgagaactacgagtatgaccgcctgttggagattgtcaagcatgaccttgagagcttggaattcaacatctatcacacttggatgaaggtcttgaagaaaaagctgtacaagatgatcgttccagccatcatcgagtctcaatcacttcccggctttgtcaccagtgaaacgaatcgtttccttgggaagcttctgccctccaacaataacccagcctacagcatggacaacctcctcagtctattgaacggtgtttacaaggcaatgaaggccttctaccttgaggacgccatcgtccttcagaccgtcacggagctcttgcgcttagttggtgtcactgctttcaacgatctcctcatgcgacgtaacttcctgtcatggaagcgtggtctgcaaatcaactacaacatcactcgtattgaggagtggtgtaagagtcatgatatgccggaggggacgttgaaactggagcatttgatggtaagatttcttgtttgatatttatttgggtattatactaacacctacatagcaagcgaccaagcttctgcagttgaagaaggctactctgaatgatattgagatcattcaagacatttgctggatgtaagtggacccaagtatcatctcccacgaattcacatgactaattttgtgcaggctgtctccaaaccaaatccagaaacttttgaaccagtacctggtggcagattacgaacagcccatcaacggcgagatcatgaaggccgtcgcttctcgcgtcacagagaagagcgatgtgctcctcctggctccggtagacatggaggacagtggcccgtacgagatcgccgagccgcgtgttatcactgccctggagacttatactccatcctggctacaaacaccgcggttgaaacgacttgctgagattgtgtccgcgcaagcgatggcacagcaagagaagctcgaatgggaccatgggatggttgaggaatagatctgtactgttgtatattagacttatggatttcctgtgagctacggattacgacttgcctggattatccatggcctttgcgatacagtgttgcgcgtgattttcgtttgtttcaattgcatatgacatcttggcttatagaccagaagaggttgctaagagaattcctgtaatgagttttctccttctaaaacatagacgacaatccaaatacaaaaaatggaatgcccgaagggtttattgtcccgagtagagcaattgatatgtaagttttttttattttttttatttcatgaattttgaacatatactatggattagttctcaccccctatcgtcggagtgctacaatgactaccccaagatggagaaaaagaaaataagaaacgaaaccaaagaaaggaaccttaagagatatatatctgagtagtccttagatcgggtcaggtgatcccaacatgtatgaatcccagcaccgtcaatatatgcaatcagcgatagcacagtggggcacactattatctgcgacttgcaacatccaacccataccatcacctaccaatctaaaatccatacacagtcaaaatggccatcaccacgctgaacttcatcaccggcaacaaaaacaagctcgccgaggtgcaggctatcctcggtaaggtcatcgaggtgaacaaccaggaggtcgatgtccccgagatccaaggcacaatcgaagaaatcgccaaagagaaggccagacgcgccgccgaagtggtaatttcttcctagacttttcatgctgaaattgcatttgcttacgagggaatagatcaatggacctgccttgaccgaagacactgccctggagttccatgcgctcaagggtcttcctgggccatacatgtatgtcttagctatattaaggcttacttactatgtgataatagtactgatgattgccagcaaatctttcatggagaatctgggccacgagggcttgaacaagatgctcgacggcttcgaggacagaactgccgaagctgtgtgtacctttgccttttgccagggccctggcgcagagccgattattttccagggaaggactgaggtgaggcaaatacagtcatttcaaatttgaatatatctaattgtgattgatgtacagggtactattgtgcggcccagaggcccagcaaaattcggtaagtgaacatccaactgaggtctgcagagaatcaaaatcaagatctgatatatgacaggctgggatgctatcttcgaatataatggcaagacatatgccgagatggacaaagacgaaaaggtaagaacggtcttgttttcccgtgaaaaaaagccatgtactaagagccctgcgaacagaacaaggtctcgcaccggtacaaggcgctggtgaagttgcagcactggctagccgaccaacagtaaatgggtatagaactcggcctgcagaagaccatagaagaatgtgaaacgaagatcaagaattgtatatggcctggcgcattccctcaatccgcattctgcgcatgcgattgcttccacgaatcgacccattgcgcgatccgctggcagttcgagtctacgtctgcatcctgctcgctgttcaactcgaccacgatctcttcgtcgaatgcctcccgcgcttcgtctgataggacgccgaagatttccgcgtcgacgttctcttctagctttttctcatggtagccccttggaataggttagtttgacggcgtagatatgttgcgaggttgattgtcataccgggaggaaagtcggtcgtaaagaacatctgtagtggggcagcggaggacaaccacgagatcgatccaggacttagggaagaggtcacaggcatgccagtcgatcaagtaaccgccatcaggaatctcatcttcgagggcatcgaggagctacatcgcgcatggattagcatgtgaattgttgagtcttgaaccaatggtgggaagaggagctttcagtttaagagaagagcttgtaggaaccattctcaccttatcctcgtcaacaacccaggtcttcaattcctcgtcgtattcatcgaagcatccacggtcctttgcgacctgattaatggataggtgcttcaagccgatctcttgcgcgagttgttcgcagtggacggtcttccccacgccgggggtgccggtgatgatcacatttggagaggtgcgcatagtttcttaaaggatagagatcttgaagtggaattgtagattgtagattgaaaatggtttccccagatgaaataattccatcggactaattttcctcccggctatcttatcgtggaggggtaaggtactgcatttggaatgtataaaagacatttatagaaacttgtaactatgtgttctttatttgactaacacgatacaaatgatatgcattgttaatggaatcgtttgattttatgcggcttcatgttccgggctggttgtacatagcctagtaccaattagcattagaacgatgagaattgaacaatcactcacttgagaagctcgaatatcttgtacttttgcagataaggcgttcctctgcgatatgctttaagtagacgagttggatctgagggcttgacaaacgtcccgagcaagcgctgcattgcaggagaagtcttgaacatgggatcgaataccagcagatttgcgctgccgttgtctcggatttcaaaacctacaattgtcatagaatgacctagctcaagttagattgaggtatataggtttgaaagttacagaaagttgtaccttgatgctggaagtatatcggagggagatcagtctgaacgatcttcgcatcgtcgtctggtgagcacgctgatcggaaatattcggcgacatcaatgtaaagagcctcataggcccgaacgttgcctgattctgacagactccgggcttcacatctagatatagggtcagcgggatcgaatcgaagcaggctagataactcacgggattcctagactcatgaaaagcgcttgtgcctaggtactcgttaggtatagcagataatcaatacggagaaaagacctacttcaggcgtaccaataaacttgcgcgtatttttgataccccctgtctcagctcttccagagctattgaaccccatatcccaggccgactcaatcatatcctgcaactcaaggatcgttggtcccttatttggaaagtgctcatagccaaagctacgagacttctgcagccaagaaaccagcatttgaatattgcgatagccacaaaacccgccttcccgacgcatcttgcagatatggcggactttggggctacagaataatgcccgctggacagatttgtcctgttcacacagccgagcaagaacaggaattaagttgtcggtctcattttctactgtctcgcgccgtgtgagtttgccatcggacgtgatttgggtttgctttgatgtgctgccgcccttctccagcattttccttagccatgagggcattttcttctcgtgggcatgcggacccaattccgagcgctggatagtgttagtacttatcttcagagatgcaaatctgggacgaatacccctaatctcttcgtcccgttggcattggttgcccttgggggactgtgaggccgtggtgtcttggcagtgtttactcgcgaggagtctcgttgcatcccacgcttgcctcctttgtgggagttcagcatgtcgagtgaatcttcatcatcaaagtacccatcgccatgtacgtctgtagttgggcgtgccggtgtgcccccagtatcatccatgccctccgcaacatgcagatccaggtgactggagagctcggcaatttctattgtctcgccacatccatgtggacagtcgacatatttgtctgcgccaccctggctcactggcagtgaagctgagttttggccagcaagatcctgcgggttatcctgtatggaactagctagccctgtttctggatggcagtattcgatgtgttgggacacaaaattagcatcggagtctgcgaaagtgcaaaaggggcatgaggcggtgttgttgtcggccatggaattttcgtccagtgctgacattggaggggaaattgttaggttgatgctgcagacaccaagatgagtagcaggtgtatatgtacaaaacgcagagagagaaaaagaatgccaaagttgattacacgaagagccagaagtatagacaaaggatttaatttgatgcctaaatggccagacagcccgttcgccgagacccactaggcggagttgtcagttcatgcggcgtacacatgcgcaacacacaacatacaacatacaatctggattatctttcattccatatattaatgaaccttggaagagatatcattattggtctcttgcttgtcctctttctgatccggttttcttcccagccctagccgaactggtccagctcgcctttgagaagtgcttcccttcatgacagccgtgggcattgaacttctttggcctttttctggcctcttttcataggagccatgtggtcatgaatatctgggattgacagatttcccatcattccacgatgccaaggaaggcgaacactctagagaccagactataaagtctctctctgcaagatattcagtcttcttttcgggcgacgaccaatggggctgctggagcctccggatggcacgaggaatcgtgaattgctcagggattctattctggaaggtgagaatccgaaattctccagtcacctacaggctccgcggtctcaaactcttcagcttggccattagcgcctctcgcttgctgttaaactgcccggagcgcagatttcctcaagctggaattccaacaaactgagtgcgtagctcaagctcctggatttgaatatggacctttggccacttggtgcacgtggcctccttcctatagtggccatgaggtatcgactagatctgagcaatatgctgatagctattctcaatgtagggaaagagattaagaaatcttactctccgcgtggctctctgggttcaaataaccagaatctgcccccaaggtagatgaagtaaataatcggaaaaaacggcaacgatctttgacaaatcgtgaatcatctaggtatggggctactttggctcttctctccataagatgtatggcaatgtccatacagatagctattgcggctattttctgtgactataaaattgtatacaggaggatcaacatgcccactcgatgtttctggcatgttccgaaaagtcgcaatcatttctatcgtgacgtgacggcttgggtcaccgcgcagcagaatcatcataatatcaacaaggacaactgaatctcaagcatggtccattcaagtatatcactgtactagtactagaaatcaattgtcgagtcctgatatatactccggaagaacattcaccccgccaagacccaatgaggtacatttcatatgaaaatggcgtgattggtggggcctccgacatcgttggttcctggccgcaacaggcaggcggtctctctctgcataactctatttccaattgagtcacaaaaaaaaaaatatgcaacccgaagtggctcctagggtctccgctttcgccggttccccctccaaaaccacttctcactcccttgcattacattgtacactgtctttacttattttgggtcgacactatggataccaccattcttaattcgaatttgccagtgaacacgcaggcccatagcaattgggtcgtgcagaaattcggcggcacgagtgtcggcaagtttgcgcgcaatatcattgagcaggtggtacagtatgacgcactttttcgatttcgacttgacggagactgacaattgtatagaccgagtctcgtgaacaacagagtcgccgtcgtatgttccgcgagaagcagttccacaaaagccgaaggcacaaccaaccggtgagtcactactccgcagccatatgacgcttgaggtattgagatactaacaccaatttcttccaaccaggctattgcgggcagcgcgggacgctgaaaatcctcgttcaaggcaatatctgacattggtggaggctgttcgtttggaacatgtacaagtcgcccaggaacaattgaaatcggtagaaataagggatcaagtgattgcggatattaccggagaatgcgaacgagtactcaagttcctggaggccgctcaaaccctgggagaaatcagtgcgcgctgtgtggacaaggtgatgagtaccggcgagaagctgagctgtctgctcatggccgcccaattacaagaccgcggggttgattcgcagtatgtggatcttgcagaagtcattgatttccccatcggtccccacggcttggaccaggacttttataataccctggcggcagctttcggcagcaaagtcgcggcctgcgggcatcgagtacctgtgatgactgggtactttggtaccatccccggtggtctgctcgatcagattggtcgtggatataccgatctctgtgccgcccttgtcgcggtcggaactcgcgcccaagagctgcaggtctggaaggaggtagatggtatctttaccgcggacccgcgtaaagtgccaacggctcatctgctcccgaccattacccccgccgaagccgccgaattgacgttttatggatccgaagttattcatccgttcaccatggagcaagtcattcgcgcacggatccctattcgcattaaaaacgtcatgaacccaaagaacgcaggcactattattttccccgactctgtggccgaactagagagaaccacacccggacatgatccacgtttgttccggacccggagtccaactctcgcgcatacaccgaaacgtccgaccgcagtcacaatcaagcatgatatcctggtgatcaacgtacattccaacaagcggtcgctctcgcatggtttctttgccggcattttctccgtattggacaagtggcgcctatccattgatttgatctcgaccagcgaggttcacgtgtccttggcccttcactcagagttgccccttttgaatggaaacggacgggatgagtatcagatcatcgacgaggatctccagggtgcattgaacgacctggagaagtacggaactgtggatatcatccccgagatggccattctcagtctggtaggcaagcaaatgaagaatatgattggggtcgcaggccgtatgttcaccactctcggggataacagcgtgaatatcgagatgatttcgcaaggtgagtaaataatgatccccactcccccgcccccctcgctctgcctttgtacccttgactggggctaactggatcttttctccccctcgcaggtgcaagtgaaatcaatatctcctgcgtcattgaagaacgagacgccgaccgcgccctgaatatcatccatacgagcatgttcaccttcctggactaagcgtcccacgtttgcgcatcgagcaaaaagtcattgttttaagatatcccttgggttttattgatagaaaaaagttatgcatccacccgaagtcgaagttccccgtgaatataggaggacacgacttttgttgggaaaaccaagcatgggctttctttttttgtgatgcatgggcttggagttttctgctttcattttccccggttctttttttttcgtctagaatagaagtcatgaagcgattgttccatgagggatgattttctctatattttgggatattcaatcacacacatcttatatatcagatttcttcttcttggtccctttccactgtagcctcctcctttctgcgccctgaatagaacggagtacaacgtactctgtaccccctgatccgacagtgaaaggaccatcggtgatgattctagctggagccaggcgtttaatgtgtctctgtcgcttcgcttgagtcggagtctgttagctctagggttactgtcgggttgtccacgaagccctgtcgcactggctaacctctttagttttacatctccttccttgtcacaacccttttcttccctgacagctcctgggtatttgtagcggggtggatacgacctatttggttaaaagcgaggtccattgagtccctgaattctccaatggcttggaatggacgagtgttagcatcatggcgaaagatccgaggaccctcataagaaggcaaacaggagagcctgggtaaagggattatggttcgtccagcaacccagtacagagtgagtaagtgcatgaaatctgttacaaggtgtctctgatatacaagcaagggcatagggaaatacactagggacctcctagattcgaacaatagaccccgttctagttccaattcattgctctgtcctcgtactccatactctgtgtaggtttggattattaggttccggcacctgcagacaagagtgcagcacatgcgttgtacgatgcagcctggaagattgattggccctcgacgcacccgagagcaattggccactagtcaagggcgttaggagatccatgacagcagataaacaaggggtgaaaggtagcgagcgtttcagagttacatcaacacttccacataccgggaggcccggaccaattggggtgccaatgctggattgacagtgtctcggtctagattggtggtgtgatactacgtgtacttgtagggctagatgtatgccggagtacggagtacactccgtatattctgtatattgtagacagcgtattgacaagagctaaagatagatatactgtacactatatgcttccaatatactactatacaacatatactattcaataatccaagcaataatgcaaacctgacatacttccgttcatcctcggtggatcagatcggcgctagaaaatgtgagcaagggaggggaccccctttggtaagatatgaattgataatacgaatgataccatcccgatatgccccacctcccatagtaaaacgcgtgacgcgtcgagataatgacaatacgtgactggtatcatcgcactatcgcactccatgatctccctctcctcctcctcccccccgcctttcttcttcgctgaaggaaaaattgaacatttctagaattctataataatgatttagtatcttccaagggtgaacaaggaaactgagagaaattctgaacgatatctcttacttgtcacagaaccccattctttcctctcaaggaaacccggcttactcttccaagtcttactctactcatttttcctgtacttccctgtattcttctcttctctatcctctctatcctctatcctcagcgtcagcagtccgtaccatatctggatattggttatctcatctcaaatcacacatctcatccattttcatcggttatcagtggcttgattcgtgccccggaagtgtgacgccttagcgccttgtggcccaacttgtttaagctgcatgacggcctgaggttattggcttcctcgatctacggagtaccattggtccaattggaattctctgcacagtctcgtcacacctagacacggctcgctcgttgtcgcaaactgggccgggggccttgttttcaacagtcgcgctctcccccaactctgtttacgcgtcatatggtccctctggtgattggtgatattgcaacttggtgccctatcatttaggttatgggatcgacgcgttctacgggcgcacactattcctcagtgctagccccatcagcccaggagatcatcagatcgcagccccgtcttcaaccctcaccgctaccactccaacccattcagaactcatcttcctatccgccttcgggtccccacaggccctcgccgacaaaaggagtccatccccagggctcgcactcgcgccacggaaaactcggtttcattcccatatctgctcctactccccccatgtttaccaccgattccccagccaaaaaagcgccgttccccatctactctacaacctctatgccacattctgccctcttcaccacattctccagcgtcaatcctgaatcatcaaaagaaaacctgtcagaagagccatccaatgacagtttcgcggacttcccagagccgtcgtatgaatctaaacttccaatgaagcgcacactcatggaggctgcacctctcaaggagcgatccaacaagaaacacaagcgtggcgaaacgccggctgcttatctacccgaaccccacgacatgccaccagtcgaggatgatggcaccaagcctccatacagctatgctaccttgattggaatgtcaattctgcgcgccaataaccggcgcctgacgctagcgcaaatttataagtggatctccgataccttcacatactacaagaacagcgaccccggttggcagaatagcatccgacacaatctcagtctcaacaaggcattcattaagcaagagcgacccaaggatgaccctggtaagggtaattactgggccattgagcccggcatggaagcccaatttcttaaagacaaacaagtgcgccgtgccacaatgtctagccttcctcttcctgctgctcctcagagagattctatacctcagtcgcaaaccgcaagcaccacaacatggatggtaccgccacagcccgcttatcacgcgccacatcatcacgtgcctgcccccagaccggctccagatgacttgtcttcagatgcaacattacctgcgtctgaccctgctcttcaggatgatgcagacgaagttgttcctgctcctccggtccgcgcaccacctcgttcctcccctccgcagaccattcggtcatctcctccaatcgctcctccccgattcgcccgtcagggtacccctccaacccccactcactctggccctacccccgcgcctcgcccgcgcaagcgcaagtcaatcactataaatgacagtggttatttctcgtcgttggagtcatccgctctcaggcctaacaaggctgggcatatcttgacatctgatttggatatcgagcctccacgcatcaagcgcggccgtgctgaggaagagatcgcgcgcatgcgcagctcatctcacgatatcagccctggtcaaccagtggtccgcaaaaaccccaaccccccgatcggttcttcgcctcttcgcagtcagtatgtgagcatgcagccgcctccattgacgcctatcatcaagttcaagaagcctgccaggccgccaccatctgtctctcccaataccaatctgcgaaaccatcgccggaagatccagcaaatggtcaactcgcctatcaaacatttgggcctttctgaagatgcccttccttggagcccggctttcaatcttcaggacgagacctatactcctcatgatcatttccatacctctttcgatgtttttgcgaatcctggatcagcacaggtatcctatgggtctcccgagaagcgctcactcaaacgcccgcggaacgacagtggtaccactgttcttggggacatcacctcggtaaatatcaatacccgtttgggtatgccctcgttgtcgcgctccaagtccgcaattttccccgagtcgccatctaagcttccagacccgagccgctttggagacgctggccaggaagatttcttctcattccatctctttgatgagagcaatgacagccccggtgaagtcgatggtgttgatctcttgcagggcttccaaaagattggaggcgtgagcaaggacgacactctgaagcccagggcgcttcatcgaccacaattgggtcaccgccccaatacgactttgttttaaggcgctcttaagttcataatttgtactttctttttttgtttacaggtcgagatctctgcgagacgcaccttgttcgatttgccttttattgttgattcttgcatcattctcctcactgtccctttattgccctcctgcttttgtcgccccgcaacctttgtttcttgaattttggattgtacctggagttggttctcaacgatgtttccaaggtcctgtgggcgggtgttttatttgggagtttttgggctgcgctgatggagccggttctgacatttcctccactgagcccgggatggcctggttatgacattaatgacgatgctaagatgtacatgcaagcgatggtttttatgatttggatatcagggtcggggctatctttatgggaaactactggaatacgcattgaaggcgttcttgatataatgtatgtagttagcaattgaaagtcgttatttgtctgcttatcaaactgtttcatgagccatccaagccgagggtatatgattgacccgatgaatggatccaatagagtaattaaagaagaattaaacatagaaacagaaatgcatagtaccgaaacgcccaatccaatggatgcgtgtagtggacaacctcaatccaccactacctcccgaggtccccagccaaattgaagccctccagtcatcgaccaaccccagcctcctttttaatcgctgcttccacagccgttgcagccacagctgacacactgaatcgtctgatcctccttgagctgagccttgggcactcgacagatacacgtggaattgaaattagtctctttcgtttggacacagcgcagacaacacagctaggggaatcagttagtttagtccacttcctgaataaaagtccctcgaatcgcaaactactcaccttctcgtagccctgttttttccacttggcaatcaagttggcatcggcatacttgttcttgagcaggaaatcgtatagttcctttgagatcgcttctttctcgtagtaaagttcatagatgtatcgtgagcctaataagaggggtagcagcaagtcagcgaaaccgtacttaatttctcgatgtcgcggagaggagtaactcgtacgttgatgactgatctggaatatgggccagaggacctcatatttcttctttccttcatgcgatgcgttttccgcatccttcattttgttgctgaattccagcagtgtgtcttcgagatcgtcgaagccagcgggaggcggtttgcgattgcgggcagtgcgaatcggaggcatggcgggcgatatattacagatgagacgaggatgatgagacaaatgtgatgcggatattccaagcgatcgtatttcgatctaacagtgtgtcgacagggtgctttttttcctcttaaatgagaactttgaaacgaaggacgtaagttgctatcgatagggaaaactgcgcgtcatttttgtgccacaccccaccgcctttgattttgaattgcggacatccgtccagctaccgtccagctgttatttcccattgcccgtatcccattccacttcaattgctactcgcatctcatatacaataccgtcattatggaacaacagctcgatctcaccaagctcaccgacagcgacaagaaggagctcaaccaggtcctgaccaacgaggctcagaagtccaacattcagcagagtgagttgtccatctccatctttctatccggacgtataagagatctatacttgatgatttctataccctggattttgagtcgagtctagcgcttaatatattccacctggaatcaaacccatagctaatatcaatccctttctagctgtccaccacctgaacgaagtgtgctgggaaaagtgcatcaccagcaagatcacctccggcaccctcgataagtctgaggagtcatgcgcacagaactgcgttgaccggtggatggataccagtctggctatcctctcgaagctggacaacatgcgcggcggccccggccactaagcgtttacctgtgtgttctcggtttctgctatgatcgctgtctggatggatgcatgtctatggatgccaatcactcttatgaagattggttaggttggagcctgtcatgctctgtttttttgcttcgatggcggttggatgggtttttctttaggggtttatggatggatagacggattgtggaaccatcacttgtatactagagtgtcgatttatgaactaaaccatgttgtcttgtacaatatatgtcggatttgtggggatgttgtaagtagaaaagtgtatcatcgacgctaccatctccctagactataggaagagttgtgagaaaatgcaatatagactaggttacatatgttgaagaatcataacatgtggactgggtatgacttgcaaataatggaaccggtttaactgcaaaggtccaaccttgtaaaaagcaaatgtataagattggcaaagttggctcttggctcttgtctcgatgcactacaagaccattaggccatatacgctacacaaatctacaacagtatactacaacgtggtctggaacatgtcttagccattacaggaccgacaagtccggcgattcttttggaatcgtgcatttcactttcacaagttatgttctttttgatcattcagcccggctggtattttagcatcaccgcagtgtaaaacaaagttcgccaaaaccctaagaaatccttttcgagcattccccgcttagacaatggccaacttggtggcagcaatgtcaagagcatcgacatcgggggtaagacgggcgaaggccttcttggttccgtcagggctaaagattatatgttagttttgattcatatatatcaacagaaaggtagaacataccggataagagtgttgatcttgacggtgtcaacatcatacagcttcttaagagcctgcttaatctggcgcttgttggacttgacgttgacgatgaagacgagggtgttgttctcctcgatcttcttcatggcgctctcagtgttcaaggggtacagaacaatcttgttgaagtccagagcggggccgtggttgacggacacgcgggggtacttgggggaccgcgacagctggagagtcttggggcggtggaagctggccgaggtgcggaccttgcgggacttgtgaagctgttgccacaaccgcgttagcgataggctccaaaaggatttctttggtctgcttcatcttttgctacgtaccgaagcgcccttggcaaccgccttggcggcggcgttggccttgttcttgcctgtagagaatatttcgttagcgaagtggactaaaaaaaaattcccaaaagttcgtccgtggattgctatttgtgaatttgccggtgtggttgcagtaggtcgaggattctgaagcggagtcgcagatgctaagatcggtaggcatattgtgatgcagatttgttctgcgatatgccctggcgtctctggctctttgcgaggtgatctccaaatatcgaacttttttgaatccgaatatcttcctccacgtgcacacggcgaattcacaattggcaaggcggcgatcgcaataggaagagcgcatagttattggaacataccggtcttgttgtcggagggggccatggctgtcgtcggtcgctgtcgatgatggattatcgcagtgtcaaaagtcgaacggatttggagtggtcttcgcttagcgaaaaccctagtgctgtgtgtgggtcaggtgacctgcagcccgctgggtctggtatttttggtatttttcagtcacagtcgtacagtacggttacttttccgtccaatcagaattgacatcgtatttggctcattttcttgaacagcttttcttcacatgccagtgacctcctctgctttttgtatatttgtccctcaaagagatctgaagaaccaaagtattcttgatatcttaatctattatcctaattttctgactcctcgcgatcattaaagcatggctccccaaaaacgatccaagaggccgctgttgttgtcgcatagtcggcctcgcatcgtaaaatccaaggacgctgctctttcagccaaggctacccgcactctaatccgatctcatcatcggcttctcaaagtccgggctcaagctctagccgccggggacgaagcccgagtgagcagcatcgacgctcaaatccaagctaatggcggtctggaaagttatcagatcgccagtaagctaggccagtcgatggaccgcggtggagattcgagcaaagtgctcatcgactggatcaagccgcaactcaagcaatggaacaaagacattccaaagctccgggtccttgaagtcggagctttgagcaccaaaaacgcctgctctacgaacccggctttggatgtcacgcggatcgatttgaattcccaagagccggggattctcaagcaagatttcatggaacgaccgttgccctccagtgatgatgaacgtttcgacatgatcagtctgtcattggtgctcaactatgttcctgatgctacgggacgcggtgaaatgctcaagcgttgtgtcaagttcttgacgtcaaaatgccctattgaacttgttcccagtctctttctagtattgcctatcgcatgcgtggacaactcgcgctatctcaacgagggaagattaggggaaatcatggcttgcctgggcttccgtctaacgcaaagcaagcggacttcaaagctggtcttccatctctgggaacacactggtacctactcgcctaaggcttttaagaaggaagagttgaggtctggcaaaacaagaaacaatttcgccgttattctcaacaaaaagtgattatctgcgcgaaaaaaaaatgctattatactccgtgtaatgctgcaagtggaaactactttgcagagagcatgtcttgcggtaagaaggcgaagacagtacccacggctgccaatatcgaggagacgatgagcagaatccaatcaaggatgtactcgcctcgaccgatctcttttccaaagatcttgagatgaaatgcaagagggaagatgatacagatcgtgaagcacaagaatgaccccaagaaagccatgatacggtcgaaagccgggaagatgaccgccaaaacaacaatcatggccactataaaaacgcgcaccattgcccgtgcgatcctttgccgtgttcctgagctgttttcagcaagaacatggccccctccgagtccacaaagaacttccattgtagccacaagaggccgagcactatatacttgtcagcaatgtccgagaagtagtgaagacgttagactcacttcaagggcactttcgtgagggggatgattgagatgaaaactacaatgcaaacggatagggcctgtgggtaactggtgaccgtgagaatgttcgcagtgatttcgtcgcggacgccatcgccaaacattagccagccaatgatcgccattgagcagtccaaaataaactgtcaactcgttagaattgaacttcatcctgggacttgatgttcttactgtaaacagataggtcacccgaagactcttcccgtatttctgaggatgcctcatatctctgtagatgttagggaagacgccgtggccaccccaaggtgctttttaacaagttagcctcatgatcacgattcctttctgtccttcactcacacataatgagaccaaaactcagagggacggtagcccagttttcagggaagaggaatgtcttagctggctgccgcaaggagcccggtgcatctggcttaatgaagccatcgatgcaaatgagtatcacgactttcgaatgtcagttccatctatcagcacggctcggaagaggacttacttgatgtgcacgaaattatacccaatatgctggtaatactcaggaatcgtaggggcaggaagttgagcggaagaagcacaactccacacacgatcttccattggaggatgctcagtcctggcaccagagcatataaactgtctgaaaagagcacaaccagcgccacacatgctcctaaaagttccaagcagaagaggaaacttgtaaccaaacgggcatgttgcccgaaactgatataagcaagatcggcatacgtcacaacggtctggtcgacatccagacatttagccagcaccttggctgtataggaagtggtaactgccgagaagacaagaaataccaatcccaacccccacccggcatgcttcatcgccaacggaagactcaacaaaccgataccaatcaacacattgaccgagttgaagatggtctgcggaagggtagattgcccaacgatgatattcacctgggtgccatcttcctgttggacatgcttgacaagtaatgggcccgcatccaaatcttcagtcccatctacatgcacatggggatgctgctctcggtggaattgaatcgcattcctccgcgtggaatcactcatccgtgaggagatggtgccatacgatgtcgcaaaagctctatcaaacgacgaagcaagcagcccagcactaggtagtgccctcctgggagatccaggcgctcgtgagtctccatcatcctggtccgagtccgagtcctgaagcagaggccggtccacgtccgagtgccgaccccaggatgggaagtttcttggtacatatgcttggccagtggcaacggcaaattcatcgtccgattgcggttgcgcagagacaaacgacaaccgccgtgggaggacctctgggaaggccgcggctctctgccaagaccgcgcgaagttgtctatactgttgggaccccccgcttggcggactcgaattgagtaggacgacgacctgcgcaaagtaatgagcctaacggtctagctttttcaacaacagaaatcacatacctctgtctaccccccggctcccaatccgnnnnnnnnnnnnnnnnnnnnnnnnnnnnnnnnnnnnnnnnnnnnnnnnnnnnnnnnnnnnnnnnnnnnnnnnnnnnnnnnnnnnnnnnnnnnnnntctctcccccgccggtctccgaatcggcggcggtcggactaccatctagatggccatgatcgtgggagctcggtgtcgcaatcggtatcctccgtgagccatataccggttcactgtcgtgatcttgatctgttccagccctcgacatattttccggttaccaacacgatagtagtagagcagcgacccaagagatatatgaggattccaagttgggagttcccgaggtgaagtgcaggaaggaaagtcaagaccaaggaaaggaaaaactcccctcacttatcacatggagatagctcccagagaaagataagaggcgagagcgacctttcgatattgaaaagagcttagcgtcgaaagagcttccgctggtgtggggtgcggatcccagagatttgataagctcgagatttgtatgtgactaattgaatgggcagttggaatctgtagacaggatatatcatttctgtggttcctctgtatgaggcagtgatatcaggccatatggatgtcactttcctaggacctaacattgtgttttagaaaagtccagtatatacgaaacataagaaagataatgtattgcacatgtttcgcatactatgcaaagccagaagtggtatccatacggaggactccgtagatactcgcctattactctgtgacatgctatcatgcaatatatacctatatatagatagtactacacatgtacatagccgaaagtagcagaaggacatgtataaaagaacaatgtacctgtacctgatcacccggtcttaggccacaacccggcaagtaccaaatacgtcacgccctgggggtagccctggcttacctcagcgtgccagccgacccctcgaacaaacttgtccacggatgtatgtccaaccccacgaggaaatttgctgtcgcttctgaacgtcatcttcagtaaaggtatgtactctccgtggttgaatctatgagtattaagaagaaaacaccaatattcacttttcactcttttttttttcttttttttcgcacctactaactgatcttaggtgtaaaacaggcaagcctaaatctttgttcgccgactcccgcccactttactgaccaaatcttcaggcgtctgcagggcctccgataactcttcccctgatcaactgtcgcctcgccaagatgagcgctcctccgccgaacgaagctgagaagaatatcgagatctggaaggtcaagaagctgatcaagcgtcttgaagccgctcgtggaaatggaacctccatgatttcgctcattatccgtgcgctgccccaaccccgtcacttatggtcgccgctaatatgccaattcagcccccaaggatcaggttagcagagcagccaagatgttggctgaagagtatgtacgtgaaaccatatccctctgatctgtctgcgccgaccgtcgcctaatcgcacaatagggtaccgcctccaacattaaatctcgagtgaaccgactctccgtgctgtcggccattacgtctactcagcagcgtctgaagctctacaacaaggtccctcccaatggactggtcgtgtactgtggtgaaattatcacctcggaaggaaaggagcgcaagattaacatcgacttcgaacctttcaagcccatcaacacatccctctacctgtgtgacaacaagttccacaccgaggcattgagtgagcttctcgaggccgatcagaagttcggtttcattgtcatggacggtaacggtactttgttcggtactctcagtggcaacacccgtgagatccttcagcgtctcaccgttgatctgcccaagaagcacgtgagtgtcccgactgattgattacgatattcatccatactgatccatacagggccgtggtggtcaatctgcgctgcgtttctcgcgtctccgtgaggaaaagcgccacaactacgtgcgcaagatcgccgaattggctgttcagaactacatcaccaacgacaagcccaatgtcgccggtattgtgttggctggttccgccgatttcaagaacgatcttaaccagtccgacctgttcgatggtcgtctgcaatccaaggttatcaagattgtcgatgtttcctacggtggcgagaacggcttcaaccaggccatcgaattggctggcgagaccctgagcaacgtcaagttcgttcaggagaagaagcttatcaaccagtacttccaggagatcagccaagacaccggcaaggtctgctatggtatcgaagataccctcaaggcaatggagcttggtgcagccgaaatcttgatcgtccacgagaacttggaaatcactcgctgggtcatgaagaactccgcaggcgctcaggtgatcgtccacacgactaaggcccaggaagccaacaaggatatcttccaagacaaggaaaccggaatggatatggaggttgtcgagtcaggctctttcctcgaatggcttgccgaggcctacaaggactttggtgccaacctggagttcgtgtctgatcgatccggcgaaggaaaccagttcgtcaagggtttcggtggtatcggtgccattctccgatacaaggtcaactttgaacagcttgccgatcacagcgacgatgacgagttctacgatggtatgttcttccagttttccgttttctatgtgtatgttaacaagaacctctacagattgacggtattgccccctcgcagagagcgaggatgaacggccagaagctcccgcggcgagtcttttgacggctcgccctgtggatcatacaggcggctcccgcgatggaactaaggcatccgtgaaggataaccaaaaaaggcctggtccacgccccgtgaagctgctcagaggtgagacatccagctaggctatcacccaggtttagctctaatgtttgtgtacagtgtcgtccaagctccaagatacgcacactgagctcgcctcagtgtctgagatgaagaagaggtttaaattgcaatttgaaaggttgggtgcagtaatctgcaacgtttggtcgtccaccgctgcttgcactgcttactctatgtaagccggacggcgttggattgttttatgtccccgccagttctgtcgtttcatctctgaatggcattttctggtacttcgctcgttatttgctcgttattaaaaaaaaagcacccgataggtgatagaaggtgctatttattcttattaagttttctgttttatcttgcggtatatgtacactttgtccatatcatcgacagtgcgtacatttttgtttcatttattcgtatagtaaatcggatatctgcaacatatgacataacgttctcagtgcgcttgcaaaatcgtcaatgccttgctctcaagcaaaagaccgatcagtcagtcaagcattgcttgaccttagctgatctttccaggtccccaaatccttacatgtctcagtgacttgacgcaaatcatcgagggctttgtggactgcctctttgttcaaatccgagggtgtccatccacactcaacgaaaaagatatactgccaagacttctttagactcggcctcgtgttaatgctcgtaagattcaagccatgagccttaaagatcaacagcgcatttgccaatgcaccgggagatgaatgatcaatcgtgaaagtaatcaaagtcttgtgcgtggcttcaagggcaggctcgccttccaccgtaggcgggttcggcagcccgagctcggcctgggcagtccgctcatcgcgcacatttctgaagatcagaaaacgggtcgtattgtccgctctgtcctcgatgttttccacgagaatgtccgtcccgtgttgttctgccgcaaagcgattggcaatggcagcgcctcgctccgttgtctccttggagacgatatccgctgccttggatgtggatgtgacgtcctgtctctcgacacccttgaaatatttggtcaggaaactttcgcactggccccatgcctgcgagtgtgtgtatagcttggttatcgagccgtcgtagtctgcccaaccaccggggtatgtgcccttgcgcaccattaggcagtggtgcactgtcaagtaatattctccgcagactttcacgtctttatataaaccattccggtctgccaggaggtccaatgtctgcattacagagccattggttgagttctcgcacggaatcacggcatagtcaacttctttcttttggagagcggcgaaggcatctgggaatgagacttcaggttgtagatcggcgggtaggttgcaaaaagactctgcggcagcctatagcaaggatcaatcatcaagctaagttgcatttgcagggatatgggataaatttgtacctggtgcgaaaaagaccctagcggacctaggaaggcgactttcaggcgagccattgtgattgtggtatggatgggtttctccgtgcttattgagctggacctattgaaatcaaatcaaatcaatattcggcttgtcatctcatcgacaggcgacatcggatctgcgagcggtgtggctgaatcccgcaatgagcgacagacaaacaaatcaaacgcgggatgaatctattgcttcaagtgaacttgcgattatcaaatcgcccaattcagcactggagtcggtgtctttgctcatgaagacaaatccactccggcccttggtctcttttcgaggcgggcgtcatgcatatcgagcttactcctcgctctccgagcggttgcatcatgaactgaccacaaggaaacttccgttgacttacgattatctgcacccccaaccctcgcatctcctgaaccttacactccgagatcttcttccacaatcccagggctcctcggattatgcgactttaccgtcattacagaatccgtccccactcccggccggtcatcacttaatctacttcccgccgcaggtgaccttgtcccaattactcccggactgcacagatacgctacacacgccgggcgaaccatttaatcggcgcctttgggcaggtggaaatctaagattccctgtgcgcagtccgcctctggatggcagccgcgcagtctgcatagaatccattcgcaatgtgacagtgaaaggccgcgagggggacgagaaagtgattgtcaccatcgagcgtcgcgtcggcaatgttcccgaacaagaaaccgccgaccagacctgggaccgggtatggaaagagaacgaagacgatgcgggggaatcgtcagtcattgagaaccgggacctcattttcatgcgcctaaagaccagcgctcaaatcgaagccgataaagcgcaattcggaaagcctgtcaggactgtgaaacgtgaggatatactttccaacccttgactatgatgtcaaatgtactaatgattctggcgcaatgaagctccttccgatgcgacattccgccatgccctcatacctactaaggcactgctattccgattctccgcgctgactttcaatgctcattctatccaccttgacaagggctatactcagaaccaggagggatacccaaatcttttggtgcacggtccgttgacactcacgcttatgctgagtgtgcttcagcaacagctgagtagattgaatctctgcatcagtacctttgaatataagaatatagcgcctctttttgttgaacaggagctggtgatctgtggcaagcctaaaaatgacactggggcttgggatgtatggattgaaggtccagatggaggattggctgttcggggtactgcacggacgaggtcggaatgatacccaattatattccacaattatacattattcaatgcgacagcacatccgaacgatatctttccgggaaatatcttgaaataatagtaacagctaggagtgcgaagctgtcgaagcagatagaacaatcaatccgtcgatggatacaaggtagttacgtaaacaacggatatcggagaaactcccccgaagttagatttgcacacctttttccttccacctgtccttctctttctttcttcaaccacacagtaatttggctattttgtgatcggctgtaatgatctaagtcgtgatcaattaaccatcaagcatcttcttctttctcaagatggatgccttctgggcagctcccccggtcattaggtatgcagattctattcgctgatcccaagctctcatcactgacttgccattcaggacccttactgccttgactgtggttcaatccgctttgatgtatagcggcttagtgagcttctattgggcgctattcgtgccgagcctgatattctcatggcgtccgcagatctttcggctggtcaccccatttctactaaccggacccagattaagtttcatatttgatctaattctcagtatgatgcctcggtatcacattgacttgacctgatcaaattgctaatgtacggacagtgtaccgctatggcagcgctgcggagaggagcatggcccccggagagttcttcatttatctcctatttgtagctttcagcatcatggtgagtgattcggtagaatctgctttttttcatctgcgttcgcgttcatatccaatccctcgctataactgcccgcccagcttcaaaatctagctgaattcggttcctgaaggcgagggaaagcacccctgcatctgtgcaacaccatcataattcgcaaaattcaggtgttgtgcaggtgtgggcatggtgggattgccttcgagctcactggcgtgatttcatatcgcgtcggtatcggaggtgccctacatttctatatacatcatctatcatttccaataccatctacatcctatttactcgtcatcctggtagtccaacaatgtcttccaaatttgctaactttccaaagctcactgcaggtggttatctgggacagcctatcctcctgtcacgtaagcctgccgtaccttgtttaattctcaggctgacactgacttgaactcagccttgatcatggcttttgtctacaccttctcccagacgaaccgaggaacaaagacgaggttctgggtcatcgacatcccggtggtactcctgccgtatgcaatgattgtcgtcggcatggtgatgaacggatgggagcacgtgctgtcagatctcacaggaattgtcgctgcccatacttatgatttcctcacacgcatctacccgactttcgggggtggaagaaacttcatccctgtgccccgcttcgtggagagatacttcaccgaccacgaccccaacagcggataccgaccgtatggaacggcgagccgcgcaccaaggccggctgagccctcgtcggcatcaggatcatcctggagcagctggacctcttcgagttcttggaacggcagaggcgctggccgaagactaggttagatcgagagccgtacatgctctgcgccgttgtcgacctgcatgggagatactttgccctggcagacgtttcaatttttattgtgcccatatggacttgagatagatagtgataatcaataagcacacggttttgggcattgtttgcccacaaaaacagatttattgaactccagtagttaatcgtctttgagtatatctatattgaccaattggcttgttttctcaattaatctatgcgatcagcaaaacctctcctaaattggaagtccttggaatcggaggcgtaaaaagtcgagaactccaggtcacgtggtgccttctccaggcgctaaactgctttgggtactggagctgccgcactcgcaaaatttccttcgacaaattttcggggttttcaccgcgcatccttcaacgacaaccaacaaaatggcagtcgtcaagacctcggagatggactacgccatcaagcctgaagcgtccgttccttccgttgatacatcggattggccgcttctgcttaagaactatgagaagcgtacgcttgtccttaaaactccacgcttgaccagccgacattgacttcttttgtagtgctcgttcggaccggtcacttcactcctatccctgctggctcctctcccctgagccgtgacttgaagtcatacatcagctccggtgtcatcaaccttgacaagccgtcgaacccttccagtcatgaagtcgtggcttggatgaagcggatcctcaggtaaataaaagtccatcagaacccctcaatggtttcgcacttttgctgaccacattcccctctgtagagccgagaagactggtcacagtggtacccttgatcccaaggtcaccggttgtttgatcgtctgcattgaccgtgccactcgcctggtcaagtcccagcagggtgccggtaaggagtatgtctgtgtgattcgtctccacgacaagattcccggtggcgaagcccaattcgtccgcgctctggagaccttgactggtgcgctcttccagcgtccccctctgatctccgctgtcaagcgccagctccgtatccgtactatccacgagagcaagaactacgagttcgacaatgagcgccacctcggtgtcttctgggtcagctgtgaggctggtacctacatccgtaccctctgtgtccacctgggtcttctcctcggtgtcggtgcccacatgcaggaacttcgccgtgttcgctctggagctatgggtgagggccctggtatggtcactctgcacgatgttatggacgcccagtgggtctacgacaacaaccgcgacgagtcttacctccgcaaggtcatcagccccctagagactttgcttaccggctacaagcgtattgtcgttaaggacagcgctgtcaacgccgtctgctacggtgctaagctcatgattcctggtcttctccgctacggtatgtaaatttcttgcccctgagtttttcttgaccattactaattctttcttcagaggccggtattgagtgccacgaggaggttgtcctcatgaccaccaagggtgaggctatcgccattggtatcgctcagatgtccactgtcgagctcaccacctgcgaccacggcgttgttgccaaggtcaaacgttgcatcatggagcgtgacctttacccccgccgctggggcttgggacccactgcccttgagaagaagaagatgaagaccgctggaactctcgatgtaagtggctaagcagccttctctttcgtccaatgtactaacttgctctcagaaattcggccgcaccaacgaggccacacccgcccaatggaagagcgagtacaaggacttcaaccttcccatcactggaacctccgctgttgcacccgccgctgagactaagaccgaggccgaacccactaaggcggagtcccccgagcccgtgaaggaggaagtcgaagacaagaagcgcaagcgcgacggcgagacagccgaggagaaggccgagcgcaagaagaagaagaaggagaagaaggaaaagaaggagcgtcggaagtccaagcaggatgatagcgatgacagcgattagatgcactccaggaaggccgtcaggtccttttcctgtaccatattttgctatttccggagtcttgggtcaaaagggaaatttgttctattccagagtttcatattgaaggctgcctatgtgttgaatctaccattcttaaaaatccgagtaacgttagcaaatgaatcacgtacatgtagcgcttgcttgttatgttatccgaagctattggctgtaatatatatttagttgtatgtatggagtaccggagtgcaaccattttatactttcgttattccaaagcctccttggtactccttagtctcttatattcatcccatttcaatcaactttaatagaatcaaagaccgcagaagtgtagtataaccgcaaatggaggcggtcaatgctttgtcctcgatgtggatctcgtgactggacatcatctccgcatttctttcccctccactttccacttcatgtctaaactcaatcctcaactttatctctcgaacttggatctgagatcaaaacaaacccaagcatcactatggcagcagagctgacatccaccaagctcaacccagagagtcacatcatcctggtaagtattactccgcacctccatgataaagcgggacctaaccggctgcttccacaggaccaaccactccttcgactacctcttgaactggcccgcaggaattttaaaaccgtacaacgagccgtcgagcgagagaaagaatatgtcatccccgcaatcaaagaggccgccgccgcctcactctccaatactcaaacgcccgaacagaccctagctgcactcgacgcaatgatatccagaatgcaaagtctcaaacggaagatggaaggcttgcaggaggaagagaagaaaatacacagccaatctcgcaagcgtattcagcacctggagaccctacataaaattccgagcctagccgatgtcaaatacgaccagtggtcaagggtacggctggaccgtttactcgttgaccacatgctacgctcaggttactcagaaagtgcgaagcagatggcccaggataggggggtagaggatctcgtggacctaggtgtattcacacaagctaaacggattgtggatagtttgcgacgtggagaaaccaaggaagcattgcaatggtgtggagagaacaaggctgcgctgaagaaaagcccggtaagttggaattgccttttcctgtcttgaagccgtctgctaacataattcttatgaagcaaaatcttgaatttgaactccggctgcagcaatacatcgagatggtcaggacacaagacaagtctaagaggattgaggcaataatccatgcaaagaaatacctcataccgaactatcaggctcagaattccgatattatgcgcgctgcaggattactggttttcacgcaggacacaagagccgagccttacaaagtaagccaaacattcatatttaattagtagtgttctcattaatggattacagtctctctttgcgcgggaacgctggaagttcctcgcggaccttttcatcgagacccaccatgagctgctttcattgccggcacaacctctattgcatattgccctttccgcaggactttcagctctgaagactcctctgtgccactcggcatatacatcgtccagctcaaactcacagtcaacatcgacatctgtatgtcctatctgctcaactgaactgaacgagcttgcacgcaacatgccatacgcccaccactcaaagagttatgtggaaagcgacccgatagttctgcccaacggccgagtctatgggaagcaaaggctgatagagatgagccgtaacatgggaacagtgaaaccaggcgacgtcaaagacccaacaacaggacaggtcttccacgagggtgagatgaagaaagtgtacattatgtgattacaatatgtgaactcggacagacgtctaccaaggatgaaacgagatactacaacttacttacatatattttcttatagttttttttattgatttgaaacatgatattacccctagttactcgctatcactagaatcatcatcgcggcttctcttcttccctcccttcttgaccggctccttctgcttcacttcaaagacatacatccgagcctcccgatcctctcccttccatccgccgcgctccccatcctttccttcaatatgccctaccgttctcgcatgagaatagccctcataagaagtccaaggaaaccggaaactagtcacaacaaccagccccgcatgcctcgccaaatccctaatattccaaagcgtatatggctcaccctcgaacagagtaacaaggatctgaccaggcccagtccggaatcccttcccggtagtatcatcgtcttttcctagctcctggccctctcctccttcctcatcctcatcctcatcttcttcttcactctcctctccatctgcatacacccactcatcatcatcagcatccataagcggcggcggcttcgaaacaagcggtatacacgccttgaagaatgcaaccagcagctcctgattcgaacgaacctgtcggttcacatccgtagaaagcccacccacatgcgggaaattgaagcagatcacatcccacgccccaccgggctggtacggtggtcctgctggctcgtctttctggtaccaggctggtctcttgcgctcgcggcgtgcgaatcctgtgcggatttccttgccgccgcctgccggagcgccgagtttgcgcgcgtccaccgagaagacgactttgggggtttgctggttgggattggcactggggttggggttggttgagtcctggtcttcggatttgctttcttctggctggttttcggtctcgttgcttgctagttttgactttgctgatgcgctcaggatatctgagacgttctgaggagcttgcgggtacttgttgtatagcacttctttggaatcgtagcatgtggcgcataggttgcggcacttgtattgttttgcaagagaacgggcgaatgagaagtcacctggttgctgttagaatttatgtttccaggtgtaatagataaatcggtgttgaagcgtgttacatgatcttgttcttatacaggaatgcatattggttccaatctcgtatatcacagtaaaagtgctctgggtatagactccatgggaaaatatacatatatagcttaattgcaaccaaattcttgcatagaatgaagaacgcagcgcaatcatgtcaactaaatcagaagaaaagctcaccttcaccaataaggaggattcgatccttccttaaaaacggcacgataggtctctggttcgcctgcatggaggctttcttaggtgggttggcattaccacttccctgcttttgcccattgccatgctgctgtcccttggcagggttggaagacgggccagatggtttgcctggtccgcgagcgcgcggcggaggggcatttttgactttcttgttattgcgaggcatgactgaaggcgaagaaaaaggagttcactttcaaaaaggaagttatatgaacttgtatgaaacaaatacggagctgtcacctgtgtctgcgactggaagatgatgcagaagaaaagcgccccggataatcaaatatccgaagtatataacgacttcaatcttctaccgccctttggtttgattttgttattttagtccaacccaaacttgaaaatttggtttgcattaattctctctagacataccactggaaataactcaaggtagaagtacatatcacgtgatatatatagttggtacctaagacatgcagtatatagagggctgtcacgtgagtcaatgtagcagggcagaacgcgactccctagtaacgtcactaccaaatttttcgacctcagatcggaccgaggatctaatttttgtaccttttgggtaatatgaatgtatggcattctaattgttagatatattcgaatgatacaaaaggaagatatggtcaagtgaagctaaacgactcgtgatatcaacctcatgaacagacctatccagcaacttccaagtccaagatcatggaacatagaagaaaataaccggaggaataagtcatattatttatagaaaaacgttctattagaaaaaacaaacagagcacggcatagctatatacattgaacaagacaggcaaggatggatgctatgaccgcatgtcaaaacaaggttagaattaaatcatactgtagaccaagagcagggggtcaggggaaaccgcaaaaaggagtctgttttccttcggggaggagagaataacagaaaagaagagagaaaaaggaatcaaacaccaacaccgaccaaagtgatcgcaggatttcccaatcagaccagaaaacacccttgaatttggctgcaatgaaacgtgaatcataatgtcacatgcaaaggagcaccgtggacgcggttgactttttgtatacacactgaccagtcagatgcatattgccattccaagccttaggagcgcagggagtctctcatgctctggctgctggcactgactggagtggggagaacaccggtacggggcttagagttttgcttgatcttggccacggcgtagacaataccgctgacgaagccaacagcgatggcggaaacactggggaaggtgactggcgcatcgaagaagacgagaccggacacggcgataggcagcttgttgagagcgccaaccatagagtatgtggtggaggaggtagtgcggacacaccatgcggatgtgtaagagatgaagacagaggaagcaccggacagaaccatggcgaagaagataccctcacggttggcctcggggaagttgcgggcgaggttggcggatgaccagtcctcgacaagcagggtaaggacgatcaagacggggatagaaaggaggttgttgtagaacatggctggagagaagatcatgttagcaaacaattgaaacaagcgtagaagaatcacatactgtcgaaatccttgaagttggtcaacttgatgcgcttgcgcatgcccaggacataggaagaggtgcacaggcagttgatcaacatccagacgtatccggcgttcagggtggagaccttgctagaggtgtcaccggtgctctccacggcatgcttgatatcagcccaggcggcaatgagcgaactgacaaccatcagaccgaaggagaacagagtaaggttagtgaccgagccaccaaaccagagaacctctccataggcaatcaggataatggtcaagttcttgaagatggtgtagactgggattgagaggaactgaagggccttggaaccagtgtagatcatgccgatcagcaggagcgtaatcgggaaccctaatatggaatcgtgtcagctgggatatctcttagcttgcgataatcggagtccatacactttttggcctcatcggagttgaaatcacggtaggtgataagacccatagacttgcatgtttgaattgccgcaatgcagaccaaagactgttgatattagcaattcgcctcggatcaagactgctagatccaatccaccacatacctggatacagagcaagaggaagttcagattgaagtccaagcccgacagaacatacttgttcatcacggtcatcataattgacgaaccacagtatgccaaaacgggaaaagcggggttgttggttatggcgggattggcgcgcggcgagggagtcggcggcggcgcagcctcgaactccttcccttgatcgatcttgttcatgtcgacggtgtagtcgtcggatttcttgccttcagccatgttgagtgaatggtcgcaaataggggggcggggaattgtgttatcggctgtttcttgaaagaggaaggaactgaaatgacagatagcacccagaatatatctaggggagtcgaggaacaaaaggagttgttcgaggaggtgaccaaagaaaaaaaggccaaaggaggttcagaattcgcggccggaaacagacacgtccttacctaagcaaggcgttaggggctgctgactcaggattttatttatagaccgataactagatgtactattgcattagaaccatacggagtacgagtacattggtagtctattgatactgatagttagggattgaaaacgctcaattatgtcaattacatgatatacgatctaactacgtagttggcagttgtacctttggacttacatattatggctacgtgcataaagtataacgtcttaaagaatatacaaaaattggtccactaactaaaggacaagaattaatgaaatacgtacctcatcccaatcgcagactataaaagccccgagaacaaatttataaaactgttcacgcgtccgtaccgagcccatataccagtggagctgctcccgaccttccaacctcaactctcctaaccacacactcccctaaaaatcccaatccataccttcacattgggacattgggctcaaaagccaaaccaaacagaagagtcgccccaaacccaccaaaacaacaaaaaaacaaccaaatccccaaccaccccccgcactttcccccaaaatgcccgactcagacgacgaagccctcttcgccgccctcgaaaacgaagatgacaccctctaccgcgaccaacgcatccaccaactaaacgccgagctcgcagccacaaaaaacaaccactccgcacgggcaacaagcggcaacacaggcctcatccaaaacgaagtctacccaacactctcgtcggaccagtccgtgctagacttcacgacgcgtacgagcaggtgtctggtgcactttgcgcaccctgattttgcgcggtgcgcagttatggatatgaggcttggcgagctggcgaatgtgcactacgaggtttcgtttgcgcgggtggatgtgcgtaacacgccgtttattgcgcagaaactggggatcaaggtgttgccttgtgttattgggttcaaggatggagttggggtcgatcggattgttgggtttgagggacttgatgctaggggctttgatggggttgaagggtttgatgtgaaagtcttggagaagaggttggtctttaagggcattctgttggcggcgaagattgggggtggggaggaggacgaggatgtgagggaggaggaggatagtgatgacggtgctggtgggagaggatttgggaggaagaaggggagacgtgggattcgggactctaaccccaatgtgagaaaccgaggtgacgacgacgatgacgactgggattagtagtcgattaaggatcttgtttcttgaaggttatacccggatattggaatgttcattcatgatttctgtatattaatggattgatgacccagatttatgttcatagttggatgtttagtagcatacccatgccatatatccatataccgagacttatacaagctgtaaagtaaccacctggcaccttgaaaacctcaactggcactatgtgtacagcatatgccacgggagtaagtcttgggcaacttgagattaagattgaataatcaaagtaaatgggattggagcgagacacgaaaggccaaggcagactgtcatcatagaattacaggcaaaaaaatatcaaagaccgtaaacacagagccatctcgacggcaaaggaaaccaaaacgaaaagaaaaaagcagaaatggagcaaaacagcaccctagagttacaacaaatgccgtggaaccgaggccagaagaagaacaggggggaattctatacatagaagcagaagtagaaacagacgcaaagcagaacgttgtcgcgcatccataagttgcacattgaatgccgggtgcccttgaaaaaccgagactcgagagaagccggaactggccggactcaaaaagcaaggcttattctaaatagccacgttcttcatttcgccaaggatctccgactcaatggcggttgaggactccgcggagtcggttttctcggattccttaagttctttgggcttggagaacccttcgttctccttattggagatttgcggggttacaatctccatgagatcttcagtctgaggttctttgttttccttggtgtcttcggagattgtgggtcctgcagtgacaacgggacttgtggtctcctcagtcacgcgtgcaagagggctcgacacgccgaatggcgtcttggggctctgggaatttccacccttggagaaacggtgcggcgagcggccgcgttcttcggcgcgcgtggggctgccgtagggggactcgcgactgctggaccgattgcctgaagcgctcacacccagaccattgggtacggggcccttccggcgaggtacacggcggccatacttctgatcagtcctccagcgcaagatatccaggtatgggggctccacattttgggtcttgaattgcttcaacttcagctcattcgtctcctcgtcaacaatgacgtcgccgctgcacagatcgtcggcgagagtcgcgaggaagctagaccacgaccgggcaaccacgtatttgcagtcgtaatcccggccgaaaataatcacctggccccattttccagcggggccgggtgccagatcaatggccaggttgttgccgccccaatcacgggcgaggggaatccaagcgggatgtgagtaggccttctgaactgcaccaggaggctgggagtcctgacggtcgagcagttctgattgccacattgtggatgagggttgctgagacggaccggccgcggaggagcttgctgcagagctgggtgcgggtggtatagttgcgttgctgagatattcgtcgttgacctttctccagttccgccattcctgaacgatctcctcgcagtcgagtagcatagcgctgaagatgacaccggtgggtaggccgccacgttcttgaccgtcatggaccattaacgattcccgcacctccaatggcagactgcagtcgagttcgtgctccaattcgttaatatcgttttgggtacatccttcaccgagctgatcaaggagttcctcataattgtgttctaaccagcgctcgatcttcctccaggagtgagcgaccggtggcggcggtggtgctccgtcgtggaaactttgcatctgaatctccggtgcaccctcaccttggtcgttcgatcgtctcttctgagatgcgacggatctcatccctggtgagtagggatgggtgggggagcccaagtcgtcggagccattccattcggatgcttgtgcccttgcagatccttttgtgggctcgtcatcataggggttggagagatctgggcgagactcgattgcgctagttgcgacagatgtgagcggctcatggcgactttggctgagagggacgtgtcccccggtacggtagggggagtcgtgggaggcatgccggtcataggaggtcatggtatgccaaaaggaccgccatgtcgagttcaacctgcatcacgtcagtaaacataaaccttcgaagggtgtctagagtctagacatccaaaggtagactaacatattcgccatggtgtcacagtagggaaaaaaaacagggcgcaggggggttaaaaccggtatttaggtcgcgaaagcggtcattggagacgggaagaacgtgtcccgacgcgggaatgatcaatagagaattcaaacttcaaagagagaacgctgagagaagggagaaaggagttgttgaaaaagtgaagatgtgaagatgtggtaggggcaagggaagtccagaatcctgaattaggtaaggaaggagaaaaggtggaggggggaagatatggagattatttatgtgtctgtttttatttttcttggaaacacaagggttttgaaaaaagccttggaataatatataggatctcctttcaatctcaatatacttactgagtcctttgcttcagttgttatgatatgactctattccaccaaacccctggccgcatccagcgaagcctcgacgctgtggtatgtagatccttttgatatgatgtcgataatccatcataagcttttgaatgcaacaataatggggtatcttgccaagtatgtgtgttttagtactttgctgcattcagtcttcaatacatgccttccaggctggatacaattacacgtgggcagtctgtatctgaatgccattgtccgagccgccaaagcaatgaaaattagagatccccaactcccgtctgatatgtgtgggcaaggttgggccaaagaagcggagtacatatacagaaataggaacacagaataggagagtttggagtgccgagttcgggttgccttgactgccccctaagaaaccacggaatacagccgagggcgaaattgatataaaattagtcgcggctgggtggatctcggggaaaacaaatgtggctgacgaataggagtcgttagggttgacaatagggggaagagtccacgtttcaaaaaaaaaaaagaactattatatacgaatgtacaatgtacaatataggatacattaacatattaagcctgcgaaactattcagtgataccacgatgtagatccctcttattgaattaaaatatccataggaagaaccctgggggatattaggatccgcactgggttcaacttctcataggctagactccacatcggaattaggaaagctgccaattttgattcgtttcaaacgatgtggctagttcagggcttggtgcaatcttggtcttggcattcaggcacatagtatgttgtagtcgttgaccctttgttattcccttagcttgatacggagtacggagtatatctttatacccgatgatactatccctcctatactcctatacctccgaatatgagtagaggctcttcggccggtggaacatcgaccagtagcttagggaacaccggtcaacacttataccaagttctcatcttcacaacaaccagtatttagagccgacgccaatatcatcgtgagccctgagtgagcatctcattcatagtcacgatactagtgcatgttttccattagcctctggatttgccaatttttctgttcctatcccccaactcgcctttcatcttcctagcccctaacccccacaccagccgggcttggtttacccttttgatcaaatcacctctctttggagagcgttgtcttctcgtgcaaccttccccgagctcggacttacctggctatacttcttcagcatacacacacaccttggaaaagtccgatatgattacactcctcgtgtcagttggatacttcacgacacaatgtctgggtcaagccgtaagctcatattattgacttataagttccaaatctaattgtaccgaataacagtcattgagccaaatcgatgggaggagattgtcgaccttccccgacgcctgttcgaatggtgtgcttggccaaaagacactcaatccgaccccgtatcggcagattggctgatggggctctggatcaaaattccagctgggtcatttcttacggcgagaatactttggaagcatgtacccgtggaagatctcgtagaccagtctgagggtgaaatgctcgaactcccaccagacgtgagaaaaaaggccatggattgctgtctgcagttccgtcagttcgtgacatactgtaccgacatcgaggattatggtggaactaagcccaaggattgggattgggataggttcgatcttggtccattcttaaccattcgcagcctccaattcacaattcgccgggataaagagagactaaacgagtctgacgatactccttcactaggagccataaaccacctgtaaacgcttcggacacgcgaaaagatgaagagatgcgggaagcccaagacgtgaccagcgaccctatgtctactgatttaatgtgagagatatattggagattgaagaagctaagctatgaaattaagaaatttgacaagttggctacttgagaaagctaaaagttagacgctgagttctgataggaagaaccatgatccattcaatccagcaagagggtatttataccctcgaggctaataagcaaactgctcagtctgcaagcaaacaagtttgaacaatcaagcattaatgggatgatccaacaagttttgacgatcttcaagcccctttttgctagtatctccttgtacaactggccacgcccattttaacattctatcaatcgtgtcatagtatttaggcaagtcgatgatgtcaaagtagtttttctcaggtgggggctcgactgcgaatggtgtaaaatccacgaccccggtaaactgaaccctcaacctaccatcaaaataagcatagaggaggcggcaaggcccatacaaatcgaactgttttccgcctagaagaggccaatctctactatacggccgtaacaggtatacacaatacccaatatatagatctattgagacttcctcatctcggaatacgacagtatctccttcgtcagatagggtatccctaggacatagacgtaattaacttacgtgctgcgttagtaggtatcacgactccatcggtataaagtaacatctcctcagccacgtgcccagtcatattcagtaataaagaacgagaggctgtcatagcggaatcgcaagaatggaatgagtctgaacagctgctgtcccagataagagaatacctcggtatagacctggaaggtgggaccgagctagataatgtggagagagcggtggagggcaatcgacaatttcgtatggaaatgctacggcaagcagaagtggacgagcgggagatttgttggcgaaactggccgtataaggatgatgaagatgtgaagatgacagcatgcctcctgagatctaacttttgatgagaatagtatgcttattcatctcggtggttggtatgcctagtcagtaacgctagatcctcctgaaggatctagagttacctgatatatttacatacaggagatattgttttgggtagtatgtacggagtaggtttatctacaatgtcttggcgtcttggcatgaaccaagaggctacaaagtgattcccggggaattcaacgaggcttatcatatgtacacacggagtccgtccacggtaccataaaggaaaacggtcgttagttatatgtactatatattacagtctcggtaattcaaaagtatacccatttgctttcacgcactattatagtactacaaacatagtggttttcgcggtatagcatctacatagtatagttagagatggaaaatccagtatgttcttacgattctaatattgtcctagtatgcatataaccaaacagggctgagatatctaatctgcaagaatatccatagcgtcagatctactagactactaccatgtacgactacttgcactccataatcggatccaaaacctgaccagtgataattatcagattgagggacgagcacaaaaccacaccgatgtggactagtcagatatccagaaaaatgcaatccccatgaaacgagtggcgaggatacaccaaggtacgaagtgccacatcagccctaggtcagtgttgaaagactgaccgaggttgaccgctacttcgaccaaacaaaagaatagaagagttgaacagcgaaaaggcccaaaataacaaggataaacgaggtaaaaggaaaaacaaagaacagcagaatcatgcatttgttagcatccctccatgccccaagccaaaaccaggcgcgccaccacatttcggaaaaaccacgacgccgaacgatggagaaaaggtataaaccacctcatcaatttaccaagcagccagtgccgtgcattatcatcatggtgaacattgcgaatattgccgcaagagacgtatggaaagaacaatgagcaccctgtcgcgggaaaggaagactagaataaaccaaccgagggacccgagaccagtcgaggatgcccgtatgaacagaatgcaagaagaaacagagtagatcaaactgatgccagttaaataaggaaaccaaagagaaaaaagaacaaaagaaacaggccattcattcaacaaaaggagaggacagacaatatcatatagagaagatcgtcatggcagaagggcgattgtggagctatgcgaagcttcgagtgaccggaggtcccgaggtatcaagcttcagaactcgacgaatgtcattctcgatttgcctggtgtctaccacacgagaaggagacggtgagctgaccggcatttgaaatggagacgccgcgtggcttggttggggggaagcatatccagaccgctgatcctgggaggttgccatgtacggattaccatacggcgccggggaacctccgttcgaggcgcggtttgagaccgggccacgatagggaggcatcgaaggaggcgggacgaggtcaacctcacggcgcagaggtgagtgagaatgggtggggtattgatactgaggacgtccagtgttctgaggaatatgctgctgttgcagctgttgattagagaatgaggaatgagacaaggtcaactgagggccagacgtggttcgcataggagtggcatagggaggcacattggaaggacggggcccaaaggatctagcatgatcgtgagaagcataagccgaggaaggcggcttctgcgggggtggattgagtaacaggtgcttcagctcctcggttttgattcgtcgctcctcctcagtcatgtcagaggactgggaggtactcgacggtcgcagcgcattcatacgatcttggtaagaaggagcgaaagaaggaccaatgtgtaagttgcgagtgtaatcagagtttcccatttcaaatgcaaacatgccatcaggattagggcgcaaggctctgggttcggtctgaggggactgaaggaccttgttcacctcagggctgctcgtggacttctggtctctggcttgcacagcagccttgaaaagaaagtcgagaggggaaggcttgggctcttcagccttgaattggttgctgcggttgcgaggcttggacggagtcacatctggttcggggtccacctccgcatcgtcactatcggtctcgatgggcgggaccaaattgggatcaggagccgacttagagaaaaagctaggaatgggtaaagcagatggtgcaggtgatgcatggaacgtcggtcccgcgtaggctgcgctcggctttggctgaggagaggtgacagcaggctgcgttggtgtgtatcggggaccactgttatacccgttgctatggtatccagatgtcgcaggtgaagccttgctgtcccggggcttcttccctgaacgcattggcttcttctttgaggagttgaagttggttaaagaatccacctggatgaccccggggctcatgttatgcggtggggatgatgggggagtagagaggagcgccggtttctgggcgtgaggggttgtattcttcttctgaggacgccggttgttgcgcgatcccttaggggttggtggatgaggagattgggtcgacatgtcgacggttggcttgaaaaataggcagcctggagagagaggtaaagagaaaaggcaacgctatgacgaagcagtaaaaggcagaagatgcggagattgcagcaaaatgagtcagatcactgctcagcaggtgtcgacaatattaaatatggcaacgctggggaagcagagaaagtgacgtgtatcaaactgtggtagtgaacgagtcgcaagttgagtcaaagcagacgctcaaaggtaaagatagacagtctattaaaagaacttgtctacgaaacggagagtgtgacaaaaggtcaaaaacgaagatcaactggagacatctctaaagaggaaaaaagaagtaaagaagaggaagattgaatcattgttgttggttgaagggaaagaccatcgaatgcagacaaacgaggaggggactccgatcccatctcgatgactaatgacgccacctgcttcacgatctcaagaacaaaccaagtcaaacagaactattgactgctggacagggtctcattgtcgcgttgtgcattgagtacccttggagatatctgttgttctaactcccccaaatcagaccttgtccgttccatctcgacgctctacactacaatcaccgctcaatcaccgctttaacctggccatcggagcctcacttacgtcagtcaccgttctgatccccccacctcagctagcttctgttgtctcgcgccaagcatttcaaaccgaccccatccaaattccgacgagaatctcaatatggccgacgtggagatgaaggaagccgctactggctcctccaagggcaaggccgtggtcaaggcctccgataatgccgacaagaagaagttcgaggtcaagaaggtacgcaaaagatctactgtttgcagcgactcatgatactgactggctattgtcaagtggaacgctgttgccctgtgggcttgggatatcgttgttgacaactgtgccatttgccgaaaccacatcatggacttgtgtacgctgaaactaccccccgacgctcttttatcttacaagctgaccgaccgatgaaacaggcatcgaatgccaggccaaccaaggatcatcaacaacagaagagtgcactgttgcctggggtatctgcaacgtgaggacctccgcatcaccccatccgaccatgtgatcataaactaatacctccgtttctatagcacgcattccacttccactgtatatccagatggctcaagacccgccaggtctgccccctagacaaccgagactgggagttccagaaatacggccggtaaagtgggaccaggggtttcaaagacactacacgatacaattcacgatttctggctgatggccgcatgcgcaatggctataacttgaacttttttttttttcaaagacgcttctggatctttacgacggctagggattggcgggcgttcgaacgattgatgtgtcgagccagctccatagtttcccattctcatattccgtagcagacaagaaagcgctgccatccaatgattattacgcttgacaatttctcaatagcttattgcaccttcaccccgtccacagttatacccggagttgccctcgcgcttgttgaacccaaccacttctctgggttacggttgtataccggccagggcgggacaacgacgaaagctgtgaacagtgtgcccgccaagccagtccataacgtaaggtgaatgtctttgtagatgtatccgacgaggaaactggcggcctggagcagataaaacaatcgtcagctcgctctggtaatacaaaactcaatatctgtgcaacatacccctgatataaccagcaagatggtcgacagtaggtctgctagacgttggccgtggaagtcctgttatcaagatcttgttagcttcgatggtccaaaagcgcagagcaataggggcggtgcggcggagcgtacgatttggccttcaatggcatcttgaataggggcgagtaattcatccatgattgaagcaagttaatcagattcgaggtcaacacgccggatcccttgatcgatgccgggcggcttatcgcaatggtgtcatttgtattctgccatgtcggaccgccttgctctctacaatgtacgagtcgtacggagtgcacgacacttcgtcaaagtacgtacacaaaatacggatcgaagctgtaacataatttgaactcaatgatttttccttgagaaattgacccgatgttaatcttgaatcattacgtggttgatcatgatttcattcgatatcatctgccatctatctctagagccacggtccaccggagcactgctggtgggaacctggcctcgagaaactcggcctacggtcgtgtaccggtgtacaagaccctgcaaatccaaacttaacccgaatccaacttgccatgtcggaaggctcacatgcaccctgcaatgcgagaagcaaggagcggtgaaacgagatcttgatggcccatgtggtggcggttagggaaagatcatccttcccatatccaaccaaatacgcattcccccgggtcccaatgctgcaatgctgccacgtgcttgtatgtcaagcgcggcgaatcgctgactcacatgcagcgattgtgttgtgacgacacaaggcgccggtttttaattataggtgacagttgcgccatcctgagcaggctccagcagcttccattggcacgagatattattggaagcgaactgcgcgataatgcggtcagcaatctcggtgaagttatccgtggccagtgccaggatggtaggtcctgcaccggagagacagattcctagcagaccgggttgagtggccggggtcatgaattggagaatttcagtcaatcctgggatcagcgtcttgcgatacggctggtgcaccttatcctgcatggcgaggaagatcatatcaggatccggcggggaacttcccaaggccgctgggaggagtgccgcgcgctggagattgaagacctagccgaggattagtctggaatcagatagtttatcaattctggacattcacataccacgtccgctctcgagtaggtctccgggagtacattacgggcgttggcagtaggcaccacaaagtccgggataatggcaatggccttgatctccggggcccaattgaacttcctgtaatgaccaatggccatgggtggcgcggggggtctgattccggtgtccacaccacctgccggagcaggcaggacttcactgagggggatctctttgcgtgccacgtcctcgggcttaagctcattcagataggtgcccacgaacccaccgaagagggaggcagccacattatccgggtgccgctctgttctcacgcgttagtaagatgtacgtacgaatcatgggaatttttttccccccccgaggactcaaatgaggggcacatagaacactcgaacctaccaatcatcaaacaaaaatcgagtagtcgttccttgctcagacccagcttacccacctcattgcccagcatgacaccggcgaccaccgcagtaccagaggagcccagaccccggcctaacgggatggggttggtgatatgcaccttggtctcaacggggaaggcccgctggtcatgacatctgaggacatacagggctacacgggtgatcagattgacttctggatcgagactgatcttctcaacactcttgctttggtcctcataggtgatggcgcagttgaaggggagctgggatgagggtttggcctcgatggtgacgtggagatccagatagagagacaatgccaggccgatcacatcgaatccggggccaatgttggccgaggagcaaggaatcttgatcacgaaggaagtcatgataaagatggctatacgtttgtgtgttacaggggtctaaacacacaagatgtacaagatcgtctgatagtccggtatgtgactctgagaactcttggcgccaccaaaaaaagtggccgacgtcggaaacgtaagtggagaccttttcttcattaatcgacgatttcttttgattggatttgattggatttgtgaggatgtcaaatccgatctcgaatccgattgcatatattctgcattgtcggtgtgtgtttaccctatacttcgtattcttgcacatctgttccatgtagaaaggcgaaacttgagaaaaaggggctatttttttaccgagatagattgccctagaatactattgtgtcatataacctgaaaatagccaaatgccaagggcaacaaaggtccaaggccaatatgtactcccgtaggatggtagtataggaccggggggaatgcaagaagtcaaagccgcatagatgacattcggcataaaatgcctcaaggaattactctttgagtacgaaaactatgttgtacggcgtactccgtagagacaatgataataatatgacaggttattttatagtccctcttatagacctgctgaaacggggggtacccgcttgcaaaattttcacctttgtttctccctttttctcggtcatatcacctcctaacctccccccccccccccccccccccccctctcttcatnnnnnnnnnnnnnnnnnnnnnnnnnnnnnnnnnnnnnnnnnnnnnnnnnnnnnnnnnnnnnnnnnnnnnnnnnnnnnnnnnnnnnnnnnnnnnnnnnnnnnnnnnnnnnnnnnnnnnnnnnnnnnnnnnnnnnnnnnnnnnnnnnnnnnnnnnnnnnnnnnnnnnnnnnnnnnnnnnnnnnnnnnnnnnnnnnnnnnngtatatcccccccccacccccccccccccccccccactgtttttcttaccttctcctattattgcaaccccctgaggttctttatattgaatatcccatatcttcaacccttttgttctccccagtggtgactctgtgggcttctggaaccacctcggcatcatcgactctatttggtcttcgccacttccacccttcccgcttttcccactgaatcccagcatcttacgatttaaactagaattttcaattgatctctagtcttgaagcttgagaactcgaattcgatcattaacgtcattgaactcgcgaacctctcgcgcctctcgtctaacagcaaccctggagccaccaagctcctcatcctcccacttcttcaagttggcgggacttcgctacaccgaggcctctctcctccaccctcttgcaggccccaagttccgggtcttcggcgggggcgataccagacccccctaactgggctttaggattgtctttattgtggccgctagacgtcagtcggtaacgctagaccctcccgaagggtctagcttatggatggagggccgtcacccttgaacgaacctcttaccggcttgcgtctgctccggtcgttgtgcgcttcaaaagcgaatatcaccaaaccaaacccccaagcaaaaaatcagccaatctggcgccctaatcattttcgtcgaatcctcatatactgagagcccaccatgtccgagtctcccagatccgagaagtacatgtacctgaccaggtacagtactccggtacccgaactggatgatcaccgcctgcagatgcagacgcctccccgcattgaagctccgatggagcgttcttacagcccgcgcgataccactcaaggtcctgaaatgctcgatcgtccagacttgctcagtgcgcaagatgtcctacaggacggtccaattccccgagactttgaaaatgccgcggaggacgatcgttcgctgaatgaatttaatggactgggtcggttctcgatcgaccacaacgcaacgtaccagactccgcgtcgcatcagtgttgtgaacccggaactcgccaacgcttcctgcgcctcgtctgtttccgctcgatcatcctctcctcccaattcagttgaggcttttgccgacccacgtcgccgtgagcgcgccaataccctggacagccatgcgcctcccgacctggaagctatcctgcagcgcactgtttcgggtggcacccacaaccggcgcccaactttcagcaacgccagtgttgttcgcccccaattgggcgatgtgccattcgatacagcagaggaggcctgctttgacgcgccaggccgtattcccgtcattgattacgaggaactcgaggagtttgtggctctaaatccgagcagtaaaatcgccgatggcgatcgccgcaagcacagcatgagctcgcagagcaagaggccccgcatattttacgatctccgtcctggcgctgaaagccctgagatgggtccaattcagaagaccagctcaactgatacactgagtgaacatgaaaagaaggacgccgaggttacagacgaaaaggagcgggttcgacaaccccatactacaaaccagcgttcccgcttcggcttcttttcgtctgagtctcaaagcacagtgcatgctgccgatttgggagatctggtgctccctggcgaaaccttccgcgatctctttgagctcgggcctgagggaggtgtgtggtggttggatgtggtcaaccccaccgatgaggaattgggagctatctcccgggctttctccattcaccccctgacaacggaggatatccaaacccaggaagcccgcgagaaggtcgaactgttcaagcagtattattttgtttgtttccggaccttcttccaaatggacaaaaccagcgaggaattccttgagcctgtcaatttctacatggttgtcttccgagacggtgtcctcactttctcttttgaggacaaccctcatgcatccaatgttcggaaacgtattggaaagttgcgagactatgtgtctctcagtagcgactggatctgttacgcgatgatcgacgacatcgtggatagcttcggccccgtgattcgggatgtggaattggagtccgaggcgatcgaagaccatgtgtttattgccagagttgaggatttcgaatcgttcctccctcgcatcggtggcctgcgcaagaaggtcatgagcttaatgcgcctgctaggcggcaaggctgatgtcattcgtggattctccaagcgctgtaacgagcagtactcggttactccccgtggtgatattggtctttacctgggcgatatccaggatcacgttgtgaccatgatgtcgaacttggcgcatttcgaaaagatgctcagtcggtcgcataccaattacttggctcagctgaatgtcaccaacttggtgttgggaaaccacgtcaacaaggttctcagcaaagtcactctgattgctacgattctggtccccatgaacctgatttgtggtctgttcggtatgaacgtagaagttcccggcgcccacacagaaggattggcgtggtggttcggcattcttggagtgatcgcaggtattgttgttgtgagttttggcctagcccgctggcagaggctggtttgattcttttttgtttattgctcattgcctacttttccttgacttgttcctgttactttgcatttgcatgttgattgactgcgatcgtctactttgatccattttttgttggtttcaagactacgatacctacttgatacatagaatacatttcttattcgtttaaacaattgacttattgaaagttgtgtggattgcatcaagccaaggagtatcattttagaatcattcagcctcatagaagcttagtcttagcctttgactgtggtttccaagacctcacagctgacccatcatatatcaaagtctcatttggcagaggaatatagatggtacgcgtagtactacgtgtcctaaataaggcaacaaggcaacaaggcagccaaattgataagactggcattttccacgatagccagcctcatccaaacaactttcacgtcgactgcatgcagccgctgattttgcctccagcaagaggtttacagctggtgtataccaccgcttgcctgtgataattttattcgccaactccaattctggccattggctgtgcagcgacacctccctccgtctttccatgcgacgccaatacaacgcgctgcagtgctatcttactgcaacgattagcgcgatcttccttcttttcgctgtcacggtcacctatgccgatgcatccgatgtcccgggtacagagaacaccttgagcctccagggggcggttcccagcgacggggcaggattcccacttgcgctggactcgttcaatgggctagaacttcgcgacagtgtcgacgaagatggcgagtcaaatgggctagagctcgtgcgcagataccctaatgtcgcgaaagcattgggcaacaatcagttcgaggcgccgggcgcgctcgagatcggcgctgtccagtggttctatctgccctcggttgtggtgaacggcaaacacgacccgaaaggcgtgggtcttcctgcatacgtgaattctacaaatgaagacgacgatgacgatgactcgacctatgagctacggaaacgagacggggacttctcgaagcgagcgacgactacggtctacttgtcgctcacgacctgccaaaaaccatctaccaacaagaccgacctacaaggcgagttcccgcagttgcagatgtatgtgtcgacttcgcagaaattgcaacagccaggaccgggcaaagacgattcgctgcaggatatgcacactgccgttggcgggtatattggaatcaccttagatacgaataccgacgtcttcgtcggcatcgcagcgcccaattcaaccgactacacaggatattacacgtaccaggtcgcagcatctatcgatgcctttttccacaatatcgtggacgatgacccgaatttgttcttcatcgacgcggacacgtcggccgcgctgctggtgacgaacaacttgactcagtctgcgaagaattcgacaaactaccagcaatggatggacatcgtccctccgtatactatgtttgcccacaatatcaacgatacggcactgcagggcttggagaaatcattctgcgctctcgatgcgctttcgcaggtgggccgaataagtagttcaaccgaggttggcatgaccaatcgcggacttgggaataagcccaaggaacaattctatatcactggactaaaccgaagttcatcgtacagcggtcttctggcaatggtgggcaattcgaccacgtccggaaatggcatcatcggcggcggcggtaaggtatggcgaccgatgaattttacgaccaaagcaggtgagcaagcccaaacaatccataccaaaaagtgactttatctaacaatcctccagaggagaactgcgccgtgctattcaacttaaccttctgctcagaagtcgcatacgcagtcccctccaaccccaaactaagcgtcgacaagctccgcacaatctacgacgactacgccgccgccttctaccagaacttcacctattccctccaacaaatccaatgcaaaacaagcgaagaatcgatgttttccctcgccgtggactgcgacgattgcgcaaaagcctataagcaatggctctgcggcgtcacaattcctcgctgcgcagactacagtagcaacgccacgtacctagccgtccgtaacgcaggccaggccttcatcaatggctcttccctgccggatgacagtccgtaccgccagtccgtggcgtcgaatacatcccgcaatcctatcatcgatgaggagatcatgccgggtccctataaggagatccttccctgtcaggatatctgtcatacccttgttaaggattgtccgtctgcccttggcttcgggtgtccccagggcgcgtggatgaattcttcctatggctatcggaattcagagggtattattacctgctcttatctcggggctgtgtattatttgagtcttggggaaaagctgggggctagcggttgggtgactagcttggtggttatgggaattatgtatttgctgtagataggtataatcactgtgaacttgtgctatttgggttctcagttatttcttttcttgttcttgtctcctctagatagcaagagctcgacctagttcgcctgtgcaccttaatattgcgcttagacttgtatatcatagagcaaataatacatacacatgtaacaaacattaccactccagatctttcctcttccccaatttctcttctttcttctcactcttcttctcttctttcaagactccttccccttcttcaaccgccctatccccccatctctccctccaaatcccaatctcttgcttccacaaatcccttacacagggatcacacgaactcccacagcaatcacccagtcctagtggaggcggcgggtcattatatccccgttctcctgcacggaggagttgttttgtgcgggttcttgttagacgggtcttgtagagctttttgtagagaggtgtttcttcaggagtgtaatatggctctggggtgggttgtgtagttgagtctgagtctgatgttggggcatcgattgatatctttgttggactctttgttgtctctttttctttctccttctctttgtcgttgcttggggatattgcggtggttggctctggagacttggccgagaaagagaatggagcgagcagacttgaaaggaggtttcctggggagtatattgaagatgtggatgtgtctttctctttctctttctcttcctctttctcttgttcttcttttgttgttggtgtctctgccggtataatgatctctttggctttggtgatatttccagatgttgatgccgatgaagcagtctgactctctgatgtctcgatactcattttgatatacagatactgaaatcaatacaagcgaattgaatcatatgaagaccaatttagtctctgttcaaaatctgttatcgcgttagtaacgtttgaagaattgatatagttaactaaagcaaacccacaaattctaggccaaatctaatcctctaaatcttcaattgcgcaaagatgtataatattcataggcacgtcgttgcaataaagaatggaatgagaagaccatgaaggccgaagaagtaccgggaccggctaagaactgttttcgtgcggttcctgttcgttccgatgtccaccgactcctatgtttaggacttggtctatgttgcctgaactggtattcataaataaggcataattggcattttttggctaaaaaagtaacaatacgtccagtaccggtatctgtgattgtttcccggggagaaagacatccaaagaaacgaaacgccgttcgagtatatcaactccgtggtatcatgcagctaaaaaatataaaaagtcgagccataaactgccatcattttcgcttcggcgtaggcgtccaaacatttcccagtgcagacttccgctcagacctcggcgtccctccaacctgctgtaacagcttttgcgctgcaggcgtaagcatctttccctgggaataccccccaccggagacagagcccctactagagctagcaccaggagtagaccgagacccaaaatccagccggggactactaccaaagcgcggtgtcaacgagacaggtgtcttcgtaacacgggcggccttttcagcacgcttgttccgcgccacacgatcgaccatgcggtgatgcagggcttcgcgtttgcgagtttcgccaagtttgaagggatttggcttttcagaggtcggtccgaggaggcgccagtcggcttccatgtcgtcggttctagagtatgtaaattcaggttcgggctcgtcttcgtcgacaaaggcgtatccgttaaccctcggggtttcgcttcctgcgaaggcggatgcggcttcggactcgctgagacgcggccggccggcgatggcatcttggatggcggatagagagggcgaagggggcacggcgttggcggcgtccgctgctgctgcggcatgtgggtctaggagtctggtattttggtagagagttcgcttggggcctgcccgagatgtgatttctgctttctgcgggagtgtctcgtgggtatcctccaccgagttggggaggaacatgagggtgttgtctgggcggcttttccatgtgtctggatttgcaggacgggcatccaggtctgttttgatggcgggctgggcatgctcgtctcgttttataagacccatctgtgggtttccgccttgagccgtgatgcgcttaatttcttgttgctggtgtgcaatttgtcgggccgagggaattttgttcccgctccaaagccagggatatttctcccgtcgcttttcattctgcttgtcaaggactttgttgaaggactcgttatcttcgctggtatactttgcctggaaggcgaccagtcccatattcgatacatcgggaatatgtcggtcttctgtttcggttgccgctgtggaagtcgatacgacggacatgggagtatcacctccccagccatgtggagtgtcacccgggcgtccggccgggaaatgatgtggtgtggctggcgccgatgcatagtctgattttcgtcttgcattcgaccccggggtgggcgtgcgcatgacgcttgccaacttcttcttggagcttgcaatccatgctttgtctttcgattcaagggcttccaggtactcttgtttgatctgtgtctcgagcaagcccggaaagaagtcgcgagcaataatgtgggacaaagtgttcgtgtagacgtcttcgtcgaggacagttgcagggcgtttgattcgcttcgggggtggtggtggaggcataagctggccagcagattgtctggccagctcctgcgaagggggagacgccatgtttgtagagcaaaggctgagggagagaataatgaaacctggaagagaggtggatgaattagtggcgataagatagcgggtcatatgattttgatctaaccgctttaggcaaccatacttcagatatcactaacatattgaattgatagatcatatcatgagctaagtagggtttaggtagaggatttagataaatcgtcagataggcaccagctgtgagatggcatccaaagccaaagacctatctagattgtaaagcccaggcttgcatatacatccgatcttactaattgaagcagcgtatccgtaatgcttttttactcggagatctttattggagagtgactctaagatgtaagccatgcttcatcttatgaaactttctcagatataggcagtgacattgtgttggaaagcagcgtcaaacttaacattcgttcgcgttctcctggggttttcgctgagcccgtaagcatggccagccgtcttgcccaaaaatctcctctcaaaggtccggggcgtgagtaaaactgactccaagtaccagcactgcaatggtgtagaagatcgtgatttccatcggtcaggacctatgtaattgatttcctctgccacatcttggcattctctttccgtattagtgctcaggccttgctgctttttgctcactgagtagatctaagcacgccactgagtctcagctgagcctaaccagtgtgtcacgtgatcttcgcttagtccgctcccccttcttacaatgaggaaggcatcggtctggagaccctcaccttcctccctcccttactccgttccttcctcctctcctccttccttctaaaattccccttcctgccttgtgatggtccgttgataggcgggaatcttttgcctttccaattgtatgagcatcaatatctgcatattcatcaacctaggaactcctcaataaccaagccaagttagtctaatggtagggcacctgagggacataacctctgatttttagggctcccaggtgagctaggttcgaatcctgggcttggcggcttctctaaatttattttttttaaccttgatgtctctcatacccctaggtatcgtataattccatgggtatctagaaatatacctatcagtacacattggtggaattatttcgtatcaaatatatgtacatactctctgtttcagtctttctgacgtggagagagagggttgggcatagcgaaagtgaagccatttttgaattttgaggatctatgggtcgttatcttacgtcatagtatatactaccttcaatactattgggtagaaatgagccgtaccccaaaacaatagcggccccacaaccttatttgtacataggaccgtggaagtacgcttccctttcaacaatatcacgctttctaactctcttttcaaagtgctttttatctatcaattactctacttgtgcactatcagtcctcggccaatattgagcttcggatgaaatgtcccgcccatttagagctacattcccaaacaacttgactcgtcgaaggagtttcacacaggcgcggacaccccatatcatacgggatcctcaccctctataacgtcccattccagagcgctccgaaagtatcctctacgtattaaattgcggattccgaaggggccctctcgccgctctccactttctgcttcattaatctgacagaatcaggcatttctaggcaggggtgcgcggtgtgatctctgtacacgatcgacttggaaagacatgaaatgtagcttaaaattggatgtataaatttattgttacactaactacagaccaggctttctttcagtctatatatacaaagcagccagctggtgacatctgtcttccctttcgatatctctctccacgtatgatatattcagaaatatttattcatagatatatttatagatacccatggatatacttctaccatttataggttccaaggtcttttatattcgtgtcaagcctttttgggactatactctcatcatctttcactcatagcctgggttatcaactcctcgcaacccgagaagtcttttctgccctttcatattcttctaatctgataatatttcttctttgattactctcattacctacacaagtatatcatacacgatgcttgcttcgacaaaaacaaaccctcctagcattgagaaagctcttcagagcgttcctattatgtcttcttcttcagcccaagatataaaccaggatctcgaacccacatctgttacctatcctaccccgaaagttctaggactggatttactagacgtccttcctgttgagctagtgctactagtagcatttttccttccccgggaggatatatacagcctctcactttgcaatcatcgacttctcaaaatattccaaagtcagacgaagcacaaactgaaagcagaagccctgttgcctttcttacgccggctcgaacatgataatccaagatacttagcatgcgacgactgcttagttctccatcacttcgacagaatcccagagcctttgcggatcccagacccgctagttcaaatatcaccctactacccacccctcctcggctgcatgcaaacggctagattctggccagttccaattgcacataattatgtgcggatgcccatccacgatggacgcagcacccgttgtggctatagactccactggtctcatctccacctagccatgcgcggattccaccacggtcccgaatacgggatcagcactgacgcgctggccttcaccggagtatcgcatgaactgattgcaggaaacgactccggattggttctatcttcggtggaggcgcggatatgtcctaagcccgcgggtctgggtctgtatatgcgattccaggacatgattgtcgcgaaaatgacatggctcggttcccaccatgaaggcttcaaattctgctcgcatcaatcaatgtcgttttggctggaggatatgtatgggaacgagacataccagccggagttttattcgaattgcgaggagtgcaataccgactatgagattgggtggctcagaaacgaagagcttcggaatatcactgtagtggtgacgagatgggttagccttggacctggtcttactccggatgatccccgatggaggattaatgcgtactgtgagacgtggggtcagcctcaaggtctgaaactggagtcggaggaaaggggtcctagtcctcggtggacctttgaaggactgactgatacctctgttgatactttgacttcgcacaatctctcctacatcgaagaagacaggtatcaggctgagatggtacgagtttctgatgtgccttcctggggcctatggaagggggcgccttggtaaatatttagttgatatgtggctttgtagataaacaggacatgtgatagtcgctgctcgaatatgttgtacgtacagatcctccatcaagtatttgattcaaggcagtcagtcattgatcctgcagaaagaaccgtaacacaacccaggctgaaatcccactccacaggtcttaactaaaatccactacacataactactctttttctctacacctatacttgcaaagtaacgccaacgaatggtattgaagcctatcagctcctctataaaaatcaaagtctataagaaaaaccagagactagcgaacgatccaaataaattccgaaatttcctccaagaaaatccttttcctttccctctttttctcttttttcccaaatcgcccttccaagacaccaggccagtaaaaatcgctatcgctgagaaatgcatggacgaaagattgaccacagctgaaacacgcagaacagaacacaaacaaaaagatatggcatataggcaaagacaagacaagtcaggcataaaacagagacacaaggaaaacacagatcgtggactcgttgagagatgttgatggagggctatcggatgacaaagcgagaggtgtgagatagatagtcatgcaaggggtgaggaaaggaaaatatcaacataaaaaaaatggggttgatgataacgatagtgacatgtactcagtaatcagtgagagatgatcagtgaggtgatcagagagaggtgatcagtgagaggttgtggggaagagagagtaagatggcgagcgggtcttcctacggttcgggtttctagaaggaacaggaggcaaaggagcctcggttttaatcggcaggggctcgccctccgaaatggacttggcgcggtcatggagtggcatgggaagatctgcaccctcgagactcgtgctgctgccactctgaaggaggaagtgcgcctcggcgagactcttggtctggcggtggtgggaggatgatgtaggacggctgagtgtctcgccggcggtcatgcggtctgttggcatgagctcgcggctgctggacaagctatggacgagctcggggacgctgttcgtcgtcgagatggaagagcggtgcttgcgcacgatggaggctgcgcgagagagcattagactctcttgcgagttgcacttgcttatcggggaaaagctgctgcgtggggagatggcgcccatcatgccctgcgcgaaggggaagtggcggtctgattctccatcagtcgtcatgtactcttcgtacaatggttcgtgggagagtggtttccccattgatgggaggatcgaggaattgacgggatggaagtagtctccgctccgtgcgatgaactcctgctcatagtctgcagttgagggggcctgggaagggattgactgggctgggctggggtccaggtctggggttgctagggcggaggtgctcagtgggctcggctggagctgtcgggttctcggggcgagccaggggccctcgctgcaggctgcgccgacttgagtgtgtccttcgtccatggatgtgccagtccaatcgaagttggaagtggactcggctgcgtgctcatagcagtagtcgatgtctgcgtcccatgagtcatacaattcatcctcatatgatggctgcaagctggtgaccggctcgggtggtgtgacctgcacctgggcgcgaggggtgtgcatgttctgaatatattgggggatagtcggcgagcccaatgcctcggagaacttcctagaaagctcctcggccacatagatcgacaccggagctttgcgcgcgctgctgggcaactgagtgtgggctgggggtggactggcttgaaaggctgagcgagaaggggggcattccatgctggactcggggctgtcccacattcgggttccttcctcttcctcggggacatcttccaaatcatagtggctgctcatggacgaggtcctggcgcggtcatcgggttcgggactgaaaaatcgggttggctgcgctgtttggagatctgggtacgtcatcgtcgtggacaagcccaggatctcgtcaatggcacggggtgccggctcatcagtcccatgtgagggaggctctggcacagcagaaggtgggggagtggtagggctggttcggggatatctggagactggccgcgagaagttctcgttgacgcgggattctctgcgtgcgtggtttgcattgtacagtcgtgtttttggagaaaccggtgggcttatgctgggcacatccaccgtggtggcagtgccaaacgagcgcaggtcatcactggagaaattacggaaatgaatgtcctcggcgcggatacctttcagatcaggctggggccgttgagatgctcggatggccgagaactcggtgaccagatcattctcgcgggtctggtccaaagactggaactgcgagggattggtatgagtcaagtggtggaaatcaaaaggatcagaaataatgcttttcaagcgttcgcctatatcgattgtcgagggtcaattgggtccacaatttccgctgcccgctgcttggcgcacttactgtggtctgtattacgggcccgacggccaaaaagctctctctctggccgggccttctcacgatcggcctcatcttcctcgtccagcgtggcgacaatgttgatcttgctcccctgccggcgcaggatgcggcttccccgcgccaaaagggaccgggacggcctatccttctcggagcggaatcccaatgacgacccggcccggtcatcggagacaatggaactatccgtggaggtcatcgaagagcctggtgagcggcgtgaagaagttgaggtggtggtattgcttcttgaacggccgctaaaaacggacaaacgcctggggctgttggcgtgggcagtggacctggagcggatatgtgcggcatattcaggttgctcgttggaagagttcgtagacggacggtcactgccgtcgtcgttgtcccaggctttactcattggagggggtggataggtcgacatagtgggaagtgaaggagagaaactacaccatgataagatgaaatctggagatctccgccgcctacaatataaaggagcgaaagtggaaagggagggttctcgagtggaacagaacgaggtcctgccgatgataataaattaatagaatacttgatgacgggggcaatacaagacacggagcggtggtggagccgcgttcaggggcgtatttattgtaatttttatttcttttttttttccattattagtatatgatgctatagtcctcctatattggtgttattccgatcggtttggttggtttctttgtttagattggagcggtcacaccatgcacccagccggcttcattattgatcatattccacgccgacaatccaaaaaatgaggaaacaaaagaaagcaaaccccaacatacacgggatatagtgaggtgcctcgaacacccccatgtaaaggacgggaattcccagcgtcgcggagccgatacccaactgccttagtggcatatgcgtcgagccagggggttggtcctgaacgtgctggagacccgcgtgtgggggagccagaaagacgctaggccgcatgtagtaaagtatcagcgttccgatacgccccgtctggcgatttaatatgtttaatctgtatttttggtatttttgccgtacctcaggttccaaggttccaaggttcccaggaaggtttaccgttagctttggacccatggacacgggaaagagggggacacacgatatacgcgatcgggcttatagattgagtactactgtagtactacaggtacatggagatgagcctagatatgtacttcgtatagacaaggttgccattgggctagatattcaattgcatatccaattggcgatattgaaacagctctatacttgattctttatttacattcgagtggggagacaagcccttatcacgattggggcgcacactggaaccttggtcgtctgtttttctcccttaaaacattgtataagtatcagaactacatatggtggtttgaccttttcttcctacatagctacatgagtataatctatgccttgcgtgaggtttgagaccagtcaggaacgcctctttccttccccgcgtcatatagcggagcctcggttcaacggttttatcacagaaggacccagccctaatgtgattatagtgtgcactgaaaacatagggctcgggaaacaccagtcctagatctcaatctactttcggcatccggcagtggggtccagaagcacaaaagtccataataacattgtattacaggataatatcggtttaattagcctaggcatacatgtgctacagcctacaccggcattcctccagttccccagttcaacctaaacatccctgttggtacaagatggacaggcaaggatctccatgcaagtttgttcttgtgatcctaccgagctgtaggggctgatcacttcgcaggcagcctcggagagtgccggtctcctatctcaggcatatccaagcagacttttttttttaattaaaaaagggaagtgaaacgtatcagactacaaactcacactgtgtcggggatgcgagacgaagctgaagaatgtgagtatccggcagtcaccgcacccttacgttatgtctgtcggagagttgcattgtctcagggcggggtatatccattgtgcctggtatgtgcatattatcaccctggtagtacgtactgctccatacggacgaagtacatcgaatcgaatcgaccgagtataataagcaattctcgcttggtattgtcgcacatgattacttttcctgccgttatggtgactcgtcacacacatattctaatattcacgtcgtctgtagtccacgcttcctatctagtaagtggaccttagtctgcagctagcatgattcgaaacaagggagacgaccgaggggaaagccaaaaacagtttcattctatttcagagtacggagtagaatataccgctagttgtagtgtgtatcgaagtgtaaagtggactcctgatgatcttatagtctagaacgtggactccggtcctctgtaatgagaactctcctccattatgcatacatatgtaatattgtacctgcgtagtgcggcacttgatattcttaattacttatatagctctctgctccgtccacgggtccactactgcgtactaggatcccctttcgagaggtctaacaagcacgttcccccggcggttcgcgtttcgtgtccatgatcgtcatcacgcaccgtactccgtactccgtacctttttatatctaggcctaaaccgtcttcttcttcgtcagatttgtgtcagaaaatacgccccgagattggagtgtcgtcgactgtcagatctattctttaagtttttttgtcgcaattttgaaacaaagagatcaaacagacgcgtttctggaatatactgagaatatactccgtactgataattaattaaagatgataaatagtaaatgtagctagccctagaatataatgacaatgacataggtgtagagtcaaggtttagggacacgttctggaaaaggagggaaaaggagcgaatccgaaaatttttagtacccatcttcattcgcatggttcgccctatcacgaacaccttcctattcatgcctcccgaagatcgacagctccaattcccgtgaaagatggaagctggtccccgacttcgggagtcatgtacgtactccatacctttaaaagccaattgcaactgtggtcttccgttttcccgctagacggccataaattctaatggtagtttagtatcgggtaacgcgctatcaacgtagactgggcatcatcccacggtcgcctatctcggtcaagcatgtaaatatgtatgcgcccgaactaccgtgtggagaatggatcaatctaatattccaagggtgtaactacaggggtgattgatatctaccataatggaggctgaatatctcaaactatattccattccattggagggagataggcgggttgattgtccttattagatgctaccatgtgcgacgatcccggggtttcgatcctgatgtaacctagcgttggccgttgaattaagtacatgataactaactagttagggcatgacagggatcagcggtgttgacattacggacaggggactcctttcatgttgctaggcattttgtgatacatgtgactcccaagggccaaggttgggctcttcgaatgaccaaatatgagacaaggaatagagactattggaaatagtcgattatccttctttctttgagcacccgtgctctagttatgcatcataagttgcatacaaagcattggaaatataggagtatgttgtattgaaatattgaagccggcactaagctcattacgataagtgatatcaagccaaatctataacgccagtcctttgtctttcgagcccagatttcacgagtccactcaattctaagtcccatgttagctttggtcttctagacaaagggtgaaatgcccaccgctcgatcatgagatctagttgacagttcattcgaggttcggttatctccctctttgttaccagattctcggagcttcggtcctggttgagagtgatggccaactctaaacgagtcgtggttactccgtacttcacttagcaactccagtggtcttgtcaccaccgacattggcagcaatgccgagctcactgataacatccgtctcggagcgcttcgcaactccggtggtctccgcgccaccgacattgatggcagcacccagcttgccgatcagatcagagctagagtcatcgtcgtcactgccaccgccgtgaccaccgccgccatcgccacgcttagcgacaccggcagtcttatcaccgccgatgttaacagcaacgccagcatcaccgatcacatcgttctgtttggggacggggactgcgagtgctgtgactgctaacaggatgggagcgatgagagtgtagcgcattctgatatgggttcagactggaatggtcgttagaactgcttgagctgggctctggtaggtttgtgctcacttatggtagagaaggtacgtttgaactggactattcttaactggacttggagtgaatagaggtaatctggctagcaacatccctaggcagatgagcaggctatttaagtatatattgtactatcgtacatgatatctggatagatgtttgcggcatgatagctgatgtgcttcaggattaagcaccagcttagactgtattctacttggacgaggtggatgtagacttgatctatgacatatgcgtagttgcgatgggtggatgcccaataagggctacggattagcagtgggaagactggaaacggtgaaggtcctagtcctagtaattggccttgtgttcaacatagaggtatgcgatgatcgtggcaaagacaacaacaatgatggagagaaatgatccgtcgattgtagtttgacgatccttgacttatttgggtagtgacccccaaaacgatgcctgcccttgatatcatcggtgaactcgatgctacgctgcacctggatttctctaaatttcaggttttgttcctttgttttcgttttttttttgcaaagtgagtcattttggtagaatcaggctacaggatattttataataaactacatttgaatatcgtaataatctaatagagcccaagacgtcaagccctaacgtgtcccgtcaagcttaacgaaaataaagttatccatccataagagcaggaaccttggcatatcgaaaacgttggaattcttctagaatcttcgaagtattgtttttcccctcgattgcctgactctacctagaatatacctcggtcccactaactaggtggtacccatttttccatgtcgatatagtggctttcaatggtgtcttacgatctcccctacgtactctctatacctttctaggatctcgaaccttgaacctcgatccgggtactccgtacggagtaaataattacgtgtgcatcctgagattgtctgaaaagtccaaatcccaaatcccaaattcgatctccgatacgtactttgtcctacgccaccgatcagactaaatgtccaaaagtagcacggagttccgtcgagtgcagcaatctcacctcaaccgctaaaagactcctgccaaaaacatgccctaatagacgagatatagcccccaatgcgacgctggcaactgcatgagacacgggcccctcggatcctccacgcctacaccatacacctgctaccacatgcagttggggcacgtctaattcactagccaagcagctagacaccttctggtatagctgctcggtgctccgtagggatgacaggggtcaatcccaccagtgaccgcacgtgcaaatccaacatttccgggcctgcgcaagccatgtctcagatggctgaaccgttttgctagctaaggaattatctccaccggaattccgaggggagttggggccctgccagattcgtgttaccgaatatggagttgcatgttcggtagattaattcgatgcaggtgctgcgcttgggcctggcgtgggtttctttttaatctattttatgcccctgccatcttctttttggtgctgggtgcgccgtgattgggtggttcttttgttactgaggctttttagatctgtcaatgccggtatttgaccgttccttgtggtgttcgcatatcggctttacataccttagtgggcacggagtagtacttggtgtggtatcttggttaattgcaagggacctttgttcgataatgtacagggttggctttttttatttttctagattttgtagactcataacgatcaaggctaataattacacatggcttgaagtgcattggggtaaatgtatcaattgcagttcaaatggccccttgccagacgcctggatgagaaaatggaaatagaactttgaatagtaacagaaagagtagtggtaatgaggcagaattcactcttgcatctccgtgtcctcggtagttttcgaaggctcgccgaacagttcgtcgtcgtcgttgtcttcagtgacaaccttttcggcttgcacttcttgttgcacctcttgctgcacttcttcttcctcgtcctcgtcctcgtcatcgtcggcaatacgacgagacgccttgccacgacgacgcggcgcagcttcttcagcaggctcgtcatcgtcaccaaacagctcgtccttgtcttccccagcagaccgagcagcctcttcatcgtcagagtcaacaaccatctcactgctcttatacttgccaggcttctcagacttggcagcctgggccttcccgcccggtcggcgttccaagcggcgtcgcttcttaggcgccgcttcgccctcgctctcagccgcgctgtgcacagcatcggcttcttcttcatccgcgataaaatcatccccacccttctttttgcgcttgctggtaggcttcttcttgcgcttgacccggtcaccggtctcggagtcgttggtcaattccgcctcctcacgagcgcgctcgtcttcagcgcgctgcatggcatgtcgttgcacctcttcgaccatctgcgcgcgttcctcggcgatacgcttcttacgctccatctcgacctcctgggccttgcgcagctcctcttcccggatccgcgcggcttcttcgcgggcttcacgggcttgctgaagcttcgcggcattcttctcttcgtactccttctggctctgcatggctcggtcaagctgcttgctgatggtgcggcccatgttggctcgctgctccaaagcggcgctggggtaaggcgggttctcctccttggaaagacgctcgaaggtttcaatggcctccttgagaccctccgctgcctcttggacatcctggagcgtcttctgggtaggctgcagaccgtacgcgagcgaggcgatttggttctgcacgaaagcaacgttgaattgcaggtgaagttgatccggagagacgtcgcgtgcgcgcgtggcgtagtcgagtgctgtcttcattgcggccaagtttgcctcctgcttgcctcgtagccaccatacacgaccaagacaagccaagatttgcacatcacgctggcgatccttcgacaacgcagcctcgtagtgttcaattgaccgtgagaactgacggagctcagcgaagacatgtcccaagttgaggtaaacgctggggtccttgaccgtatcgcgaaccttggacaggatttggacagcagagctgtggtctttcttgtcatcgaccagggcgatcgcaataccttgggccgcatatgcgttcttgggatctagctggagagccttgtcgaagaactccacagcacgctggtaaatcttgcgacgcttttccttgtcttgatctgtgtcgcggcgcatgtcacgggcagcgaggagatgaacattgcccattccagtcaacgcgtagcgatcatgtttgtcatagtactgcaacgtgtgcttgaaatggcgttgctcgctatcttcagcaaggttggcaactcgtttcttcgccttgctaagataccatccgtagagtgcccgaacttccagattcgtgctgtccgcttcgtaaagcttgccaatcttcttagggccctcgtctgtggggctctggcgaagggcaatatatgtaatacgtgcattagcttccgtgtagtcagagtgacgctccagaagaccttcgtagaccttcttagcttcgtcccacatgtcggctgcctcgtaagtccgtccaaggttgtagctaattgtggtgacgagcgcatcggtatccgtgccatcctctttttccttggactgcacgcaggcgttaagtgcagactggaacaagccacgagctagagcaatcttctcgctctggtataggaagcagcccatgttgttgaggagctgcggcgggagactctccctaagagcagcgttcatctgatcctggtcctcgatgtcaggtcgagcatcttccggaatttcagcaatctggatctgttccagttgggtcaggcactgcatgctcttatcaggagctgtgccctcgtagagacgggaaagataaacaagaaccgactcgtcgggggagatattttgtttctcgtccttccacatagagcgcactgactcaagcaaagtgatggctcgctttgcctcagtcgacttgtcttccttgctgcctgatttctgagcagcgaatacttcttccgcgtgaatagcagcaaggaggatcatggcctccgggttcttcgattgctgaacaatcttctctagtttgaatttggcaccgtcaaagtccttgttcgcgatctgcatttgcacagcgccgaatttggcgggaagataacccttgtcgactccaccgcgggcttgatcggaacggttgtagtactccgtggcatgggcatcgtcgccttcatagtgcgacttgcgaccgaggaggtaccagccgtcactggcaatagacataacatctgtgtgctcgatggctttgcgtgccaatgtctcgacggtgggatatgatttgcggaggaggaagtagctggcaaacagggagcaggtcatcgggtattccttgtccagcttgaatgccttctgggtgtattgagtcatggctaatttgtacattgacccaaacatagggtcggtggtggctcggcgagagctgtcgtggaggtagtaaactgccagcaggacgttggcaaccttggactcggggttctgcatagcgatgacggttagttatggtgaaaaataaaaccttgcggaactccctctcgcataccagagacaaagatctctcccaagctaccttggcttgatccttgaagcccagctgccacaagcaacatcctagaccaatacgagggtcaggatctgtgaggttaggcatcttgatcagagccttttggtatccttctagtgcatctgcgtatcttcctagcatgtaatgcgcgcgggcacgtcccagaatagccatgatgttccggccaccaaaggccttggatgactcgtcgaagcatttcagagcctgccgcagcgactcgactctttccgaggtatcaatcgcacctggacgaacagcacggggcgggtatagtgatgcacggaggagacacaagacaccacgcgccaggaagagaggaggataagccgggttgagtcgcgaagcctcgttcaacgtcgacgtcgcaagttggaggtagtgatctttggtcttggattccgagtatagttccccttcgggcgcaactcgaggggcatgtcggctctttaacagcagcatccagcagatccagcccagcaggccgagtttctcctttgtcgctccgtgggcgacggaggccagacccttagtcaagatgtcgatggcatggtcgatctgctttcgcttcgcgtaagcgagcgcaataatcacccagaaattcttggccgctttttcgttctccaagagggtgcaaagctcagtcgggtcatcggggagctcgagcaagctgacttcgacttcgctgtcgaagctggacgcgggaatatcgatagcatcggggatatcggagaagcgcaagctgctcaatgggctagctgcaggtacagcatcaccgttcaggccattggtttggccattctcaagaggcgccatgatgagtccgggaacgggagggatgaggccactttgcgagtcggtatgggattataggagcctcaactcatgatcaagcgaggcgatccatcaaaaaaggtcagaatcaggagcgttaaggttagcgaccctgagtttggagaaaacgcgaaaaattgactctcggagacaacagcgcggcgatgagaggtgagaattgaacgattggagtggctgggctgcaccgccacaggacgccacaccgcatacaataaacaacacaacaccttttggacaattgaatgatcactttccgatgttttcgaaatgaataagagcaaaataagtggagaaaatggcatttactaaatttactagtagaatacctaggtgcggtattcatccctgcacccagcttgttacaaatttgcaaagcaaagcaacactgagcagcaccccgaagataagaccaagctcactccagtggcgcaggcgaccataggactcaacatatccagctgtagcagcaaccagctggccatctattgcattatcggctttgatcgaaccggccaactcggatgggaaccggcccgtttcgaagtactgatccataagttgatccttctcggcccagcgtgctgtaagccagtcctcaaactccttctggtcatcaagaggaatctccgagacgttgaagcgtctccaatgcatgttgactgaggtcggcggtcgtccttgcagatatgtggagcgaagagtgaagtatttatcgggatagcttccctttctatagacggacttgtgaatatcgttctactggaatatagggagagggaaacatacggtggcccttcataggctatggtgcagtcatacacccagtctacggttccccgcaactgctgaagacagaacaacagccctgtagaccgcggaagaatcacgtgcttgaatgaaggcagtccctgtttctgcccccaaatgtcgctgcgtctcttggtattggtggacaggtttgtcccctcggggaagattagcagccacatgggatcgtactgcgggcgggctgagttggagcccccgtagacagtcttcaacttctgcaaacgatgctcaagccttggcttgtcagacgtccacttgcgagccatgaagataaaaccgtagaacatcatgcccgtgcccaccaatgggatatacttaagcgactctttcaggatgatgaagaggcggccatgcatctggttggtgtatgcaacccaccaaaggtaaacccagtcagtgtagacctggtggttcgagatcagaacgagacgctcggggaacctggtctccagtaatccatctttcgatagatggatctgcccacgcacgctagcatcaccactgacccggaagagcgtcggagagctccattcggtaagagcagcgaggaccagtccgaagctttgttttgtatatgccatatacgaatagtagtaacgtttgttgatcagatacagcggggagccgattacttgtgtcacgcagatcgctataatacagcaatccacccatgtcatcagcagaagtgaacgcagtaactgcatgggaatgccatgtttgagacggggatcggaaggtggtttggtcgagagctgctgaagatccccgagatttgcggtcggcggcttgcgctgtcgaacctcggcagactccatggtagaagttcggaggttcggagatccctgttgttttagagactgacaaatgaggtagaaattcaagtaatagactggaagctagtgaatgcttctacagctgtacagagcccggtctggtcggatgtggagaatcgagatagtgatgatcgatagtatgggctgcaacaaagctagacagaagctaggaaatgaaataaattgccattcccttgaggaaagaaggggattataataaaagcgattgttaaatcaaaagagataagtgttggggagctgaacagttggagagttgaatagttggaggggaaaatcaggcggatctggtggatccaaaatgacggtcacagcctcataacgtcacctgagtttcttattatttactttgacacctttttctttgtgattcatccaattctctgagatcccggagctatacaacttaaaatcaactgttgtgtcaggtcattatacgccagttcctacttcgggctgaaagatggcgcgttgatgtgagcaccgaccaactcgaatcctcattggagtcctccgggctgatacatatgactagggtcgataggcctgcgattcttcttacaacatgctctgtgccatcatccgcagaagctcgcgcaggagttcccgtctcgccttgcgccagcatttttccacgtctcaaccacgtcacgaggtcaaagacatcggctctttgtctcagcgcctaatacccaaataccaaggtgtggcttggagctgtcttattggagcggtcttattttgttggtaggaagactaatatattctcagaatcttgtgacggagagctgctgtgtctccagtggccagcaccgccgcgaaatatcttcttggtgcgcaaagattgcgccccggcggttacagattccctgattgaattcgtcaagtaagatcgagagatgcccacgggaagcgacttgactcaaggctgacatctacgagccatgtttcctctacatacccatctatctcggtgatcctcgagtcaaagactgccgccgaagtacattcgtcgctctcttttcccgtatactcggtttctctcgacgaaaaaacgaccgcccttcatgataaagtcgacctcacggtgaccctgggaggcgacggtacgattctacatgcggcgtcgcttttcgcgacctgctcaaacgttccacccgttctatcatttagcatgggtacattaggcttcctgggtgagtggaagttctcagagtttaaacgtgctttccgagaagtctacatgtctggtgccggggcaggtgctcgcacacctgtgttagaaggcccagaagcgacagtcacacaagaaattgagatgggcccgaccgggtggtcttccgtccggggaaaatcaatgggctctacgcgcggggcacgcattctgatgcgcaatcggttgaaggtaggactgtttactgccgacgggaccgaaacgacgcctatccgaaccaaaaccgaccagggtcagggagtgtatgtgatgaatgagctgctcattcaccgtggcaaagaaccgcacttggctgtggtagatgtgtttgtgggtgggcggttcctgactgaagctgtggccgatggaatcataatttccacaccgaccggaagtacagcctacagcctgagtagcggtggtagtattgtgcatccgctagtcccagccatccttctaacgccgatctgcgcgcgtagcctcagcttccggccattggttctcccttccagcgcccccatcacgctgcggctaagcgaaaagaaccgtggacgcgaactcgaggtcagtctagatggtgtcaatttaggccaagggatgggagttggtatggaagtccgagtctggaatgaggagatgcgtcatgggaagaatgagtggcagggcggtgtccccagcgtgatgcgacggagtgtgggaggtgaagcgcatgagggctgggtaggtggattgaatggattattgaaattcaaccatccatttggcgaggtataacattgtacgataatataggatagaataagaagatcaaacacgaccccgtacaaattatatcaagtggaagaccgtggatccaatctccttaggagctgatgtgattggcagaggcttgttttctgtagatgaacttcccaagtactctcggccctatctcaggggacatctcttccccccctttccctcttcattcttccccaacactcaacttgcgattcttttattgattctttgaagtctgatatcgcgttgcttattcttgagcatcctcgcagtgcgaggaccgctcctcatttctagacaaacaggtacctattctacccctccttcgattccctcgatactactctactctctcgttatcccgggaagtgagtgtgttcgagtgattctctcgacaaagagaaaatccctgaattgtttttttttagggcatcctctccctgaatgcagttgctaattcctgtctagtaactagcgctagccggtcttaggcctcaggaggtctcggcgcattcgtttacccatactccctcccgccccctgcgcgacctgggaaatcccttgaacaatgacttcgtatgggaagtacgtagtcgcaccatctatccttggaaccccgaatctggtggaattttactcaccctccatagcaacatgtacgcgccggagcagttcatgaatccggggccagccccccgaccccctaccgatcgaccccccaagttgactctacccaccaacagcacaacatcctcctttggtcagatgagctcggactctccgatcacaccgggtctgtcgtcggcaaatctctcgcttttccccaacaccagcagtccctcgctggctgtgacccggagtaacactacccaaaatggaatctccattatcaaagaaggcaccgtccgctgcaaagaggacaagttcttggccacttggaatacgcgttacttgatcctgcgcgaattcaaactcgagtttttaaagagcgattccggcaaggtagtgattaccttccctttgtccacggtcaccgctgtcgctcgctccgaggattcgaagatggcctttgaggtcactcgcctggccaacccgaaggatgcaaactccaaaaccgccctccttgctcgagacctacctaccaagaccatcacctgcgaagtcaaatcggacgatgaaatctacgagtggatcgacaagatctacgagcgctgccctggcatgggcggcgtcagcaatccgacaaacttcagtcaccgtgttcacgtcggctttgaccccaacactggcgcctttgtaggcttgcctccagagtgggagaagctgttgacatcctcggctatcaccaaggaagactacaagaagaaccctcaggctgtcatcgaggttctcgaattctactcagacatcaagatgcgtgagcagaacccgcaatactatgctgggatcaactcttcgcccaatggtcaacccaaggcatacggtagtagtgttggaagctccattgcacccccacgtcctgccccaccaggacctatgcagcgccttgatagcagtcagtcgaaacaatctgaaggttctatgcgctctgcgtcatcttccgtcggacaggcggaccgtgcggcagaccaccaacagcaagttgaccggatgaaggaaatagccgatcaagagcgtcgccgcgtggaggaggaacgtcgcaacaaggaggagcaagatgcttacaacgcatccatcccgaagggccgtcctactatggctcaacaggagcttggtggttatggcggcgacgactcgtcacagaatagccgctatcaaccaagccgtccagcccctcaggctccaggctctgctgctcgccagcaagaccgacagctcaccgcacagcgtcccgcacccgcgccaccgtcgcagagtccttacggccaaagcgcagcaccgggcgctcctcgaaccgatgaccagcagggctctccaagctcccgcagtgaccctcgggccccaggctctgccaaccgtccccagcagaacggttctaaggccggaccccctccgacacgcctaccggcccccgttcaagctgtgaagccgttgaatattgccaacaagcaaaacgggaccaagaacgtccccgatggcgttcgcctagccgaagccgctcttacgaagaaggcagagccgcggaaggaggtgcgcatgtcaggcatgtcagagaacgaagtcatggagcggctgaggtctgtcgtatccaaggataacccgaacgagtcttacagcaagcagcgcaagattggtcagggtgcatctggatccgtttatgtggcacgggttaaggaaaccgcacctactggtgttgcccacgagctttaccggacgtatggcccgcgctgccaggtggccatcaagcagatggacctgcgcagtcagcccaggaaggagttgatcgtcaacgaaatcattgtcatgaaggacagccagcacccgaatattgtcaacttccttgactcattcttacaggaatcaagcaatgaactctgggttgtcatggagttcatggagggtggcgcgttgaccgatgtgattgataataacccagtaattactgaaggtcagatcgcgactatttgtttcgaggtatgttttctatccaatgttgttttttatccaattactgacgtttttaccaaaagacttgcaagggtctggcccatctgcacaaccagagcatcattcaccgtgatatcaagagtgacaacgttctcctcgaccgcgttggccatgtcaagatcactgatttcggcttctgtgccaagctcaccgaacacaagagcaagcgcgctaccatggtcggaaccccttactggatggcacccgaggtggtcaagcagaaagagtacggcccgaaggtcgactgctggtcgctgggtatcatggccattgagatgatcgagtcggagcctccttacctaaacgaagagcccctgaaggccctctaccttattgccaccaacggaaccccccgtctgaagaagcccgagaagctcagcaaggagctcaaggctttcctgagcgtctgcctctgcgtcaatgtccacagccgcgcttctgccgacgagctccttgctcatgaattcctgcagactggatgcagcctcgctagtctagctgagctgctccgctggaagaaggctactagctagtaaataactgctcttcacctgcacaacttgaagcaacatctggatcccatttacgcgcgtcctcaatttccattcacgcgcgccttcgatttccattctcacaggaaccactcttcccgtgtgttcttttcccgtcttcttcactgcactctgcattgcagatatcattgcggctctgttctctttacttaccatacaaccctgggcgtggataatctggcgtttgatctgttttttctttttcccctgtccaacttcttttcgatgcttgcacaaacacataccatgtttccccctatgacgttcacgattttgcaacttgcactgtatcatgtgcccttgcacaaaagcgaagaatagtttaaaatccgatgtgactttgacttgatttctttattaaaaagaatcaccgtttacgtgcattgggccctggtgtatgtaaccttgggctctttgtgccgtactcagccagttgtccaaaaggatatcaaacaaatacatgtcttcacataaccttacggggtcaatttcatacatggttcatcgcctatctgactccatatcacgaacaacactaatcgggtacttatgcctctgtccttgacaagacaatggggcttaggataatctaaataccgttgtatcgagattgatatcagagaccactaccataccatttttaatgtcaaatattttattgaagcccgccttgagactaccctcgagttaactgagagaggccgcaaatgcgaccaattatccttggatgtaatatgtcattgacaagcgtaagtaaaacgagtatataaaaattcatatagaagacataaggaacgaaagggaaccaagacctccaatatctcctccatccaaaaaaattcagttcaactcctccctcacaactgtaccgtacaaaccttgctaaacaagactccaacaagatcactctcgtcctcagaagccgtccaacggcccccatccacaagcctctgtttccaaatactctgctcagacgcagacagatcctcccaagcttgcagcatctcctcctcgaactgctcggactcgtccgcagatagagaagcagcagtctcaataatcacactctgctcagcatcttgcccttcaccgcaccgaacgatgacagagatggactgcggagcgagggtttccaggtcagcgggtgcggcaccggcgcggtgaacgcggtccaggatctcgcggagggattcaatctgcgagtctgtgggaccgaaggtcgccactgggatatcggtatcactgccgcttgcgcgcggcgcaagaagtgtatcgaaatatgtcagcttatcccgtgggggtatgacgtattcccttgcgatggctccgcggatgctgtctgggagccattctgtcgcaccgaggacaggcggggtaccgccgcggatctcggcgaaggcaagcattgctacgcagattgcagatattgagaatagtaggatgatgatgctgtatactagttcccagatttcggcggggcctggggtgacgaggacgtagcgtggggtgcgggaggaagttgggaagggggatagtgggaatgtgtgtacgacgactgtgttgcccatgctgacagaggcgagctttatgttctgcgggccgacgtctggggttacggggtgtgccggcgcgatgaaggtggagaaggtgagttttgtcattgagaatgggtgcacgtcgcggagggttgtataggggcggaaagtactgtagccgcggtttggtccgtattccaaggtaaatatagggatggaattgtcgctgccgctggctgcgataaccgtttgttgttggccttgcgggtttgttccgagttggcagatatcgattcctaggccgatcttcactgttcgagggagcttgcgacgtcgtagaattttggacttgctcgatttggcattagggagttgaaggaggacgagctcgctaccaccgcgatttggagcattttggaggagaagcagggttctaggcgagaggaatcgtagcgcgcggaacttgggacgtgctgtgcgggctccactagcgggcagaggaatagtataaatggagcggacctcgggggagctgttagaggagatctcgccaaccatgacgtctgagccggtggtatatgccacaaggaaccggccgtgtgcatcatcggtcttgcccaagtcgtcttcgagcttgacaaagtccaggtcctcggcctcttcattgccgcttaattggatgcggccaatgatatccttctcactgggcgtctctgtgacgcggaagaacacaatctcgccggacggtgccatacccgttgcaacggctccgatccgtgcgtgtttctcagcgccatccttccctttcggccacggcgagagtctcgtcactcgctgatatgtatctgaaggacctggcccattcttccctcggaagagtgatgcttgcgacaaagctatagccttgccgggaataacctcttccttagacttggtgtcctttttcgcctcatccttctcgctgtcttcggcgctttgtgtggtcttccgtggggcctcaaaccggaatgagcgaaggtgctgattgttattctttttctgttgctccacagagctatttataccggccagagcaacaagcgagcccgcctcgtcgctggccagcggggccgcagccagcgaggttaccgagtcttcatcgcgtgataggttcaattcgacgacttcagtgatctcatttcgatgtgacgtgtcaagcagagactgtacataaaacaacgattagcatttgcagagggaggatattctcgaaatggtgaacttgcgatcttgtttccaactccactacgcccctcgccgcctccgccaccgactaggagtcgaccgttgttgcgcgggtcaaagtccgcagcgaagagcggacacgagagtgtcaatttagcggagtatacggtgggcgccattgttgtcgacaaaacagagtgtaaagaggacagatgggatgacggaggtgccccggattcttggcgcggtaacccgggattgccgcgcgaaaactatattgtatagatctacaaagataggactactactctattttagttggtatgggaagaagatgagacgaaaaaaaagtaaatagtattttatcatgcactctaagcattttaagcctcgacttcttgagaagtgaactcgggcaggcgcttgcggatatcctcccatgtctcgtcaccctcaacaagtgacttgacagcctgcaggatgtcatcctcgctggcacggacctgcttggtggtatcgcggtcgcgcagggtgaaggtgttgtcttgaacggactggaaatccacggtaataccgaagggtgtgcccaactcgtcgttgcgagagtaacgcttgccgatactggcggaagagtcatcgacacggttggagacaccggccttgcgcagcttcgaagtcagacgctgggtcagaggcttgaaggaggcgtgggtggagagaggaaccagcaggaccttagtgggggcaactgcgggagggaaagaaaggacctatagagtatcagtaccagcgttcatgtgaaaagaatgcaaaaaggaaggcttacaccacgggtttcgtcaccggcacgggaccagtaggagtgctcaatgatactgtaaagaatacgtccaataccgaaggacggctcgatcacattgggggtgtactcgcggacattctcaacgcgagtgcgcttctcaatcttgatcagatccttttcgatctcaaccttgccagatccaacaccctcaacatcgacctcaatcttgccgtccttctcgaggtcaagagacagcttctcgcgcagctcctgggacagagcctcaacagccgcctcgacagtcttggcgtccttcttgaatcgagggccaaacttcttcttctcaagttcaatctggtactcctcgatacgcagaggctcagcacgggcttggcgcaccacaagaggggcaccggtcttctcccggtggacagtcagatcataagcggagcggtcagcacaaccgacacactcaatccagccgtagctggtcagcaactcggcatcccagcagtcagtagcgtagtgagccatctcattggccatgtgctgacggaagcgcagcttggtagggtcaacacccagcttcaacaggaaggactgaatgcgggccaagaaatagcccaaagtctcgttgtcgaccaggccagtttcaacagccttgccgatggtcattttggttagctttgtgcttccggacagctgcacgttacggtcaagcaaggtcagctcagtatccttgacctcatcgaagcgagcgtgcttcttgccaccctctgggtcgacgtagtgctcaatctcggccatgaggaactcgcgcacacgcaggagaccggcgcggggagagatctcgttacggaaggacttgccaatggaggcagaggcgaacggcatcgactgctggttgaactccaggagcttggcgaagttcaggaattgaccctgggcggtctcaggacgcaggtaaccgggcatgttggcgctagggccaatagtggtctggaacatgaggttgaaggagactggaggcaacacctcgccgccggtgacggggttgcgaatgtcgtgcttcttgatgagctgctccagctcggggccaccgtagttgtcaatttgtgcgagggtctcctcgtactccttgaccagagcatcatccagcttcttagcctcggtgcccttggcctttctcttcttcttggcctccttctcctcgtccaccacaactttctcgccgcgcgcctgtttgtctcccttgaggcgggcctcgagcacctcctcaaccaagtggtcagcacggaagatctcgccagtcttagggtccttgcacatccagtcggcgaacttgtccacgtgcccactggtcttgagaatctcgtggggggtcaacatggtggtgtcgacctcgagcatgtcctcctcgagcacgaagtgcttgcgccacaagtcggtcatgttggcgatcaaggcggttccaggtgggccatagtcatacagaccagatacaccaccgtaaatttcgaaggagggggtgtagaacatgcgacggcggagcatggagtccagcaccgtgcggtcgatagactggccggtcttggtgttgacggtggccatcttgacgtttcgtttcaagctcttcgggggaggggtgtaattcctgaactgagtccgaatgagagacggaggggaaagaaaagagcggggtggaaatcgcaggcgcggcaattgagtcatccactacgcaccagggcaaccctcaggcaccaccgagaggacaaaagacaaggagtatagaacgagacagaacgaccaattgggtcggtctttttctttttctttttatttattttccttctaaaaaggaggtctccggggtcgaatcgcagattatcgctccggggaaacgattgtccgaaataatttatttctcgacgatctttacattttccattgccttcaacagcagcactttaccctctcagctttcaaaaatgggtgtccctggccgatctggaccgcctccgggcgttatgggagatattaaaaccggcaacaagctgcgccggaagatgaaccatgtcaagcgcaagagagccaaagatgctgcgcgccgagaagagcgctacgctttcaagaaagaagaagccaagaacccccagttgaaggaagagcgacttcgccgcaacattcctctgactctcgagcggaaacgtgtctggaacgaagccgacaacgacaccgaagaaactggtctgggattgagcattgacgttgagcgcatcaagcgcgccaagaaagaagaagaagacgagctcaatcggccattggaagagggcgaggatgacagcgaggctccggaatcagacgctgagtcggtcgacagtatgctggagtcagacaacgaagaagatgaagatgaagatgaggacgaagaaaagggcgaagacaaagatggcagccgcggccggaagaaggcctctatccgaactgcgacagagcgtgccacaagtcctacgcagtcaacacgcagcacaaacctcagcctcgctcctgaagcattggccgccaaattccctacacttttcaccgagggacctccacccaccccgaaaatccttatcactaccggcctcaactccaccctccacgaccaagccgaaaccctgaccgagatgttcccgaacagcgtgtatatccggcgtaatgcccaccggtactcgcacaaattctcagtccgtgagatttccaaattcgcggcaaaccgtaatttcaccacagtcatcgtgttgaatgaagaccagaagcgaccctctgggctaacgatggtgcatttgccagtcggcccgactttccacttcaccatcagcaactggatcgacggaaagcggcttccaggacacggccgagccaccgagcactggcccgagctgatcctcaataacttccgtactcctctgggtcttctgactgcccatttgttccgcacacttttcccgccccagccggatttcgaaggccgacaggttgtcactttgcataaccagcgtgattacattttcgtccgtcgtcaccgctacgtcttccgtgagaagcgtgagactgagaaggctgtcgtcggtgctgacggcaaggaaatggtgggtgctgagggtatccgtaccggtctacaggaactaggacctcgcttcaccttgaagctgcgtcgtgttgataagggcatccagcgtgccagtggccaggaatgggaatggaagggtggaatggagaagacgagaactctgttccaactgtaaatgtctctttatgttgttattcggttttgcatggggttcgagggagttatatccaaaagcttgtctggtttcattgcaatggactaaatttacttataaaccaccatgaactttatactctgaaggtcataagaggccacgtcggctctggattggttacttgcacaaatacattcattggctatccatacccaactccctaaaagtacgaagatggccaataatattttgtcacatgacatggcgttgctaacatctttgattcattcaagttgtccatccaagtgaccaacgagatgcattcgatggattcgaacattgacctacccaccgttgcggagattgaggcttcgactgatatcctcagtatacgaaccaattccattaaagtggttcgactgcgagaacgcttcgcggtcaagattggatacgcgattccgcctgtagaggcagagaacataaaatttgtcgcggccaacagcatggtttccgtgccaaaggtctatgccaactttgtcgatccagagaaccagaagagatatatcattatggatttcatccctggggccggcttgcaaaaactacacccgtcgctcatcccagccgagaagacggttagcaagcggatcaaagagaccttcgacgaattacgagcaataccatcaccggttggaaacttgaatggcatgccttacctcgacggtgttttggcaacgccagataacaacccagtgatttctgggccattcacaaatcaagaacagatgaatcagggaatattgaaaaggctgggccaaacgcaatcaccgcaccacactcgcttagtgcaaggaatggccgaccgaaccctcaaggaccatcgaattgtttttacccatggagatctgcagcggaagaacgtaatggtggagcgaacggtcaacaataatggagatgcagacttcaaagtgactcttattgactggaatttgtcgggctggtatcccgagttttgggatttctgcaattcgacaatatattgtcaacggaaaccagattgggttgagctcattccagacatatttgatcagtacccgttggaatatctcatgatgcaacttgtctactcgatggtcttttactgatgaacttaaattgcatcaaataacaaatcaagtcttgatcgtcaaaatagagtccgaggaactatataaacatccactgatggagataaacaattccttatccccgatatcagccaaccttggaagtcacgagacgatctcctgcaactgagccaatgacaatagaaaaaaaaaaaaagaatactaaacaaagtacatcatacccaaacaccctccctccctagaaatatggatatcctcccccggcgcctcatcttcatagcctcaataggcaatccaaagccctactacaacacccgccacagcgccggacacctcctcctcgatgccctaaaacccctcctcgaagtcaccctcccaaacacaggcctctaccacgaaacatggcaaagcccaacacaaatgaacataacaggcccgaaactcgtgcgccgactagaacaatgggcaagcgagcgcgccagccgacttgaacgaatcgccagcgttgccgcaacacgtgcctcgtcgtcttcgtcttcaacaaccccaaccccaaacaacctccccgcacaaaccacctacccaacaaccctcatcatcctccacgatgagctctccatcgccatgggcaaggtccgcatcatacgcggcgggcctgaggagtttagtctgcgcggccatcgcgggctcgtcagtatctgtgagacgctgcgcaagaaggggttgtatccccgctcgtcgggtgcgaaaaagacgggcaccgggccgttggcggatctctccatcttgcgcgttggcattggtattggtcgtccgtcgtcacatgatacgggtgctgtttcggactatgtgcttgcgactgttaccgataaggagcttaaggcttatcaggccgctgcgatgccggtggtggggactattcgggatgagcttttcagacctgcagggaaggtctgatgtgccaatgtgcagagtgcttatggcccctcatgattggttatatgcgcagcgaaggcatggaagtgaagaaagtaatgaagagcaatgtcaaagttggctcgtggatgtattaaccatatacatagaaaacgcctggttgaaaacaggagatagctgccgatgttttatcgacaaaagcaaagaaaaaaaaagacgccagtctgtggcgcagatctcagcgcagcaaatgaacatccggtattatgctaatagagtagtcgattcaaagaacaactcaaacggttccagctatgctcaaatcgcgaatctcctgcaacacctcctcgacccggttatccagatcacccttggcatactggtcacgagtctcggcatcgagatactgctgcacctgcgccatgcgggaataagcctcggcacagaagcgcagctggatcttgacgagagcttcgaagctggggtcgaggtagggcacacggaggtcgataagctgggggagttcgttgaagagctgctcattcagctgctcgtaggcctgcttggccatctcggcttcgcgctcggtccgcggcagtttggtgacatccttgtctggcttctcggctagcttcttgaccttggcgcgcatggcgtcgtaatccagtagcttgtggttgcgtttcttgatgcattcgttcacgtcggggaagtaggcgcagaatcgggagatggggtcgaggacggtggtactgtggattttgtcagcaccattcatgtgtgctcgttgatgttagtgaaaggatctcttaccggtatggtccatccaatgccttaatggtctcggcatcaagatcctcaacggcttgcttgtagctccggctcacaccgtcttttgttcccgcgtcgccatagaaggcatcaatagtctccgcaatgcgcatttgggacgccgtcatggctaggaaaagtcagccttgaacaagcagatctaacaatccgcagagcaaagggcacccacctcgtagtgaatcaagatacccctttgcctccttctgcaaccgattggcagcagtctccatagtccggtaacgactacaacgagcaacgtcagttccattccagtcccagtataaccatccacagatagcagcaatgacaaccataccgttcctcgatctcataatcgcgatcattcgtcctctcgacatgtcctatacaaccaccaagtcaacacaccattcgcatccacgtgggcgcggcaagtaaatcgtagcgcgtagcgggtatctcaatccgggatcgccctcatctcgattcattgcggggtagaactcgaacaaaactcacccgtcttcatcatcacctgtgtcgtcgcacggttgacatttttcttgaaccctatccatccacacggttagattcgctcacacaggcaccggttcatgagtccgagatgttgtaggataagaggcgtacctgcccaagacatggtggcggtgttagttcggaggatccggagatgaagatcggctttgagttgagtgtgggttataggctgtcagtgggtatgaaatagaagcaagtcgtatatgatggcagttggctgcagtcgagaagaatctccgatgttgaactgtagggaaagtcgtgaaggtcctggacccaatgccaaggtagccaacttggtctgccttacggatgtggctgtgtgtggctgagtgctgatgattatgtcatatcgtccggatgcggacacgtcatgtttggtagggctggagttcgacggagtatccaccagcgttgcaattcaggttctgctaggatctgtagtatctctgtttttttgcagaagatccacgactggtaatacgcggtatatcgtgccaaggtatggatcgaaatattgtatagttaactataggtagtatcgagttgtgacattcctactcagatcgtgtgcatatagccgcttacgctagtaggcgagcattcaagagggagataataataaaacccattttagcataattaccccttaccccttaaacagcgccatagttagtgtaaggctgggtcttgcatccgcgacaatacgcctgcatggcatgtgcatatcgaggtattcctcttatccacttcgtccacttcgcctacgccgtaatgctgatgcctaagtaactgagttatgtgttagttcttggcggacagctgtatgacaatgccaagctcgaacaaatgcattttccgtctgctcgagattttactcgaaatccattttttgggttggttgcttggattgggtatctgggtgaaggaagtcgcatagtccgaatccacctctttagctgcatgtgttgtatattaccgagttccatacggagtaactactccgtacagacccaaggtatgtggataattagaagttataaatgcatgtgtgaataaataatcaaaggttggacggagtacatagaaaaaagtacggagtagtttcaagtctttctctgccgtctaccttgaaaacttagaagttagcaggtagaggatatctataaaacaaatccatactatatcgagccaactggattggtcgtgctcaatggcagaggcggtaaacgcggccaactattctcgtgtgattaactagttagactgcgctagtctacaatatgacacactcgattgcatcagaccgctgggccttcttgtttctcgctagcgtatggaggatgcatgggctattatcgttgatcggaaaaaacctccaggttgaatgatatcactggccctggtgtgttggaaagataccggagctaatctactgcgctgtgcggatcgcctcggtgacacttgtggaccttgcatcgggtcgataaggcgccgatcttcgagttgatgtcataggtttttgtagattgtgaaactcggaggttgagtagagatgcgttttagttgtaagaggggaaataggaccttgaaacgaacctggtatgggataatcgatgtgcaccttgctacgtagaagcaagtcacatataacgggaattcaaaatgcctaagccatatatacaaaaagcgtcgataatatgtactagaaatcgacgtcgaaatgagacgaaaagccaaagcaaaaaggtccagatgacctccagtataggacatcccacttgggtgccgattcctgttcctgatgctgtttcagcagagcctctgcctacaatcatataaacaccagaatccaggatcaacaacccaggtcagaatatacccatcgcccgctaaggctgggttcgtcatagtggtacaagggaagaaagattcaaatgggaatttcccgccaacgccgtagaaactcgaaggtacctgccaaaaaccccgtaacgcgaaaaaaagaccggagatgaaactccgaaagactgtaaaggaaaccggatcaaaagaaaagggtcatgattcttcgttgcattgacgttgaagacatgaggatccagacaagaagacaagctaaaatgtggatcgatgtaatagaggacaggctgaagaggctggagggatacactgtgaatgcgccggagccaaacaggataaaagaaaagaaaggcaaaaaaaaaaaccttcgttaggggcctccttctagtttaggagcattcaaaggattaaaaatcagtaagcctctccttgaatgggtctataataaataaccgccctgtgatgcaaatggaaaataatagtttcggacacatcaaaccttacggtgcgggcctgtgacctcgacacctgacaactgtcgtgttgaaacgatcaaaacccttcctcgccggccttacacagcttgatctggcgcacccattcggatttgaggacctgtgaggcattgatgcggcgagaaggattgggatcaaggatggagtagatcacgttgcgacaacgagcctgagaatttataagtctttgccccggggccgcaggagggggattagctgttcttactcgatgtaacgtctcaatcggagcgtatccatcttcatgtttacgaccgtcaaggtaccgctggtagaactcgtcttcatccttgcgtgccacacgccaaagatgccgcccggtgcgcatggccatgtagatcactccagtcgcccagagatcaaccgctcggggatcgaattctttctcgacgtattcctctggggcaatatagggggcggagccgcagagtccggcggtcatatgggcttccttctcccaggccatacggaagcattcaccattaccaaaatcggtgatcttgagtgctccgtgagtggtcaaaagcaaattttcgggcttgaggtcgcggtgtgcgacacccatttcatgcatatactcgacaccgcgcatcaactgcttaaaaaagcagtcggcttcggcgacttctaatttgccggcagcaaggaccaaggtgtacaggtcgccaccagcgcagtactccatgacttcacagtaatctcccttggcatcttgcaagaggtccaaagtgtgaatgacgttcgggtgacgaagggaagatgagatgcaaaattccgaagtcagacgtttttgatacttcttggtcgtttcttgcggccggcggcggaactccttgacagcatacagctgttcacatttggaatcttgggggtcgaccttgtgcgagatgcgcacgataccgaaggcaccgcggccgacaatctcctggcacttgccgtacttgtcaaccagagacgcggtggcgttcgggccacccttcttatcggcagccagcttatcgcgctccgtcttgaactgatcaatccaagtcgacatcagcgacagctgttgctcatcggcctggtcatcctttttccggctaccacccatcatatctcgcaatagatcggtgagcttctcttgccgtctagcacttctgaggttgtgtacatggttgccgagagcttccgacacaacctcaaatcgcttgttgactaaagctccatcttttgtctttttctcatccattttcttcctgtccttttccacgggctcgctcttgagcgagggatttcgtgatggtgttcgggaattttctcctcttgatggaggtctagaaggcggtccggaggcgggttgagacggtggtttcgaggtcttgccgttgataggctggatactttccacgctactgtcggatagttcccgcggcacgtcgttattctctttacttgctgtgtgtttcgctgtggttgagaacatgcgagtgaggcgagcggccatagtagctttagtcggcttgccggcggaagataatgccggagcagggagagcgtccccgtttgcgtgggcagccagattcatgcccgccagggcgcgtgctaccgaagcatctccatccggagggtcatgcgaatgttgtgaggctgcggcggaagagactgcggaaggcacaggtgaaggggaaggtggagtcatgtgcggtggatcgacaagtgaagattggaataatggggggtggacacaagaattctccggccccaggatggaagacgagcttctacagcgcgcacgaagctgcggcgaatcgaagttgtcttaaaggtaaggatagagagaagtaagaggaggcgaggcgagagaaaaaaaagtaggtggcctaagatggatggcctgaggcaacaagggcaaaaggtgacgacacaaagagacacggcaaatattggaagtaccacacaccagaatgatgcccgctggcaacgaggagcccctagggtatatagacaagcaataaaagaggagagagaaaagaaaaattaaaaagaaagagaagcaagtgggaaataagtgggataaatttggcgatgctagagaacttgaaatacgacggggttctttttggtatggtaatatattacatagttaaacccataaaaaattgtaaaattcaaatgaaattgaaatataaaaagtgaaataactcgacaactccaagagaagggggaaaatgtgggcactgcaacggtataggttaccctcgaggattattaatgcttgcaaatacttcgttatggtcttgacctatagggctacatagtgcatcctgcatacggtgactccggcgctgtgagacctaaccggtaaagtcgagccatctagagacatctagatacatctaggctataacatatttcgagatatattttagttgcacacacattctttaatagtggcgtacattttcatagaggaaaggattcccgaggtccgttccgaggctttagtactgatttcttttggtgagagatttaatggtaatgaaaccgcgaagtaatccaaagtaattaaagtaattagtataataaagtcgagtaacgaaagtacaggtttttttttttcaagactggaactgggtctctgccgcgttgagaagcttgatacatgtacggagtatcatattattttctcttcactggtattaatgacgttgggtaaggtgacgtcctcctgtatatgtgcactcattcgctattcaacggacactgctatcgctactacaatttacaacgttggaaatacagaggggaagtagctttgatagttccgccaccacaccaaaggactgaggctgtgcagtctgcacaacgaagcccagtcatgattcgatcaggccccgcaccaagccgacacgctgggtgcacttgtggcggttgtggttatcccgaggccctgtggacttccgatgtatgaggtatccatttagatccattcatccgatctaattggggggatactgttgatctattagccggagcatacaatgggaatattttagacgtgctttcttactgtatatggtaggtgggggattatcatttgaaagttgtacttagggcatagctgtatgtgatggaagaccatcctcttacttgacgaggtactacaatacaaattcacactgtatgtaaatcgaatccaggtaaccccagttctcaaaggacactgtcctcgttggctgtaaatcctaaatcccctgtcaaccaattgtcagatccctccgtttatacccgtgctcactcgcttctttcattgtccagctggtcaactcgatcattccgaaagcaaaacaccccatttctggaccctacttcctgccagtgatggctacgcgatcgctgctacgtaataataatagtcggtcaatcatgcactcctcttcatcggggcgaggaaaccgcgtgggtctctgtgcgatggagaccccccgcagcgatgtacaatgtacataatgctctagtacgttataggggaatacaatagagactaaagtagctttccgctatctagcgtcattcggacaaatgatggcatttgggatgggcctcggggtggtacaggttgaccaatgtccatgttcgactgtttcaatttgaaacgaatagaatacaatatatcgcctttcttagccctatgacttctgcacgggaatatgtccagccttattactttggaatgtggaatgcggaatgttcaccgtctcttcggatccctggtgtgtccgtgtgggggcaattcttgacagtgtcttggatttccatactagcatgagcttcgcactgaactcgggcttggtttcggagctagtacggggtggtaactagcggtatactcaataatgttattcaatggctggttttaccccggattactggcgatttccgaataagccccttagtgctgacctcggcacgggacacaggaagaagaatcgagtcagacgttctgctgcagaggagcaatcaagtgaaaatgaccgtttcaatctcatacgtaacgaaaaaaacagcatttccactttctcacacaagcttccgtatccagcactaaccactacgaggcattttcacccaatcacagccctaggaacccatctcaatttcccacagcacaaagttactagttatgcatcgtcgacgtacaacggacaatatacagtactaagccttctatatcaatattatatgcagctacagatgtacttctataaacaagcctttcactactacccctcttcatttcaaagcggatgactatttattctatgatgctcttgctttcatctcttttagggtttcccctcacctcgcaaagcattcccctggttagatcttggtgccaatatcgagaacaaagggcaagccgagcaagatgaattcaacaaataagattcaagcccaccacgggttgaacatatttctatcgttcatagaaatcgtttcatattaaaattgctcccaagtacgccatatctctgaagtccaatcacttttgatagccagctaacagaattcagaagtgcaaatcagccttattattacctagccctggacagctatcctgatgtatgagtcgcatacaatcccagtgtcgcatccgagcagcttaccagggacagagagcttaccctgaattattcgaaggcaagaatcggcaatacaatgggcctctcttcactggaactgctagagcagcgtcttaccgcactggaaggacagtttctctatttccgtcggccaatccttgatgagtggtcaggtaatccgagaagtctgagtgaagtccaggagagaaataccgtagcacgcggtaatatcactatggacatccgagccatcgcggatatgattcaagaagacccattcagagcttagaaatgggaaacatcgtttgcgcatttctacgatatcacatacattgaggctaaagacaacccctctctacaccaaagtccccgccttcggcgattgttccatctaaatgcgaatgttcaatctttacgccggtttactcaacctcgagatagcaacttccagagtttacttgctagtctctacaaacattggatttcagagtggaaagcggacaactccattgagcctctggacgctatcatggcatacctgactgacgtcgacgcaaaagccatttgagatggctggctatcaatagattgacaggagggcttatcattattggggcgtatggcgtcgcccgagactgcggcgctgctatcttgcaaaatgtcagatgatatgccattatgaacctgacacaatagatacaaacttgattgctaggatttagcgctcaaattcatatgaagtgctagtcattcgctcgctgtcctctaccgcatcctcgcgtccagttactataacgccacaacactaactcgctcacccggaacgaacccgtagttaagacgccaagaagatcaaaagggtgcataccattaaggttatatgcgatgaaagcaaaatccaaaggcctctcccgtgacccctggtctacaccaatgcaagccataatccgctatccaatccctgggttcccattatacatatatatgatggcagaggccgggcctcctacagtacacaaagttcaaccctgcaccgaagtatccagggtatccgtatacgaacctttgaacgcggtggatcctaaacaaaagagaacaacctacgtcgcggcatacgtggatggcagatacttggcaaagcgaagatcccgaggatcacatctatccgataaaacccctgttcattcgaggcaggggtccgcgtccacgggtcggttcacatgttgagctaagtgcaaaaaaaagaacaaccacaaagccacccaacaccggccgcaacgcaaattccgattcaagccggtgcatgcttgaccgccagtctgtggtcgcaggaaagacacacacccagcctcgaacctataggattggtcggctttgcaccgcgacacctcacctatctcgcgttgctaaatggtcaaagctcgagataagctgttggcattatattgtttttatcctgcgtgcgtgcgtgtatgtggcctatgggtatgcactagtaactgcactacttacatttctatatatgcgctgcgctacgctacggagcagcagagctcgggtgaaaggggcggagcttgtctttgtgtttgcagctcttatcccgctgtggatgtacgttgtgctaaacctgtctgtgtggacgtctgtgctttggccaagtcatgcaggatgcaggatgtggacgatctgacctggagctgggagctgtctgtgggtatctgggttttcttttccgttgcgatatgcattgagctttgctttttcttggtgcggtgggtggaaaaagcaattgcgagatccaattagtgtcgtatgatctatcttcgaacttgattctcgaggctgcacctatccgctggtcagctcctccatgcagaagcagacgcacgagccacgttgggccggttgggaaagctggctcttggcggtgctgcttggctatagctgttcggattaagagtatgcctagcgctctagacccggatctaatttggactttttttatggcgttgttgtggctgcgggatttctttgatttatacgacctataccccgggtttattataaacaggcattttaatgaccggaaacttgtagtgagacaattcacatggatattgcgtaatatcagcagtaatccattcttccgactgtccccgaacaccagtaacaaatagctctgttcggcattcctagttcataacacttgatatgcgaagccgagctatctgcgggccgcccccgggccaactccgcactgtcatttccctagcgtacagcgtactagcggcgctggagatgccacgtgggaaggaaaccggtctcattgaatggcagtcacacatgaaaaagcggtatgcataaccctgtcgtgcttggcttcggtgctgtgttccggtaatctcatttctcgccaacgtgctgttgcatgcaggtatccgtatcacagtatccttgacaacgggcgagtccgctgcggtgtgtgccagctatgccgctctcacgccttcgagataccggattcgtatatgctaacctcgaaagtaccagcggtgagattctgtcgcatttcccttccttcacttagactttcgcgcgaactggcccccagatttcacgaggcatgcacagttcgatatcatgacagaactcgagtctgctaccagatcagaacacacaagtcaacaacaaaggcagcatgccagaactaaaatgtacgtaccacaaactgctccaatgattcctcgaataactcgttgttcacgcccacaccgccgggatgctcggtcggagaaagaggattcttaaccactaaacagaccgaaatatgtcagcactatccaaacctgccaaacgagatccataagccacacaaaccgtattccacaaacagattgatatagatctgttgcagcgcgatgcgcatgctaggactcttgaggtccgtcagcatgacaaacttggtattcgtcggtgtctcgtagtagtgaagcttgtattggctggtggtaaatgacacaaagctagttgcggtaagcatcgggtttgtccgtccgtctaaaagccagcaccccgtctggcttgcttcaggggcagtcttacttgtcttcttcaccccctagcttgcgcaccatattccgcaacgagaataccgtgccgaaaaccagcttcgaatcatcgtctgtcgagcgcactgtctggccgagaccggtcggcggtgcgtcggtgactgtgttagaccgggacttccccacgatggaggtcgggcgtggaagccagcgacgcttgtagatgcattccgctgaatcgcagttagtatatgaagatgaattcattatataaagcgtgtttaccatgccgatcaaagatgtagaacgagtagacgaccattgtgtattgtgtgacctgaaacaagttgttgttgatgttcaagggagttccaaggctgacaggcggtgaaatcccctatcgataacaaaagcccatatcaaaaaggagcagcctaggatttcttcggcgtttgcgattcgaccgggtctttctctaatttgacttccgtacatagggtttagtatcatttattctattcgcttctgtccaatccccgcaaagagggtctcgtaaggctgacctttcgcttcctacgtcgaatcccccgctcgaacttcctcattaccccacacgtctcctaccagtgcttgatgataagtttatttcaatggacgaaaatcaggcaatggcaacccctatgtcggatatctccgcagagccctctaccatctcactggagggggtgaacgatgcgcgcccccaggcgagcagagttgggtgagtttgactatgaaacaaccgcggaagattcattttcgctgacgccattctgcaactaggtcttctgcatcctatgatagcactgggaggcaccgacgacgaaacccaagagcaaggcgtccggtgaaggtcagtctctcaatgccgttatgacagcttcggagaactgataccgcggactaggaaacactggacgcccgctccgagtattacacgagccaagacgacggtactgcggaacatcgcatcaaccaatacgtgatcaaacaggagatcggacgtggatcgtttggggctgtccatctggctgcagatcagtttggcaatgaatacgtatgagcacgaacttgcgggatatgctgggaagtggacatgctaactgtgagataaactgtctgtaaatttaggcagtcaaagaattctccaagtctagactaaggaaacgtgcgcagtcgcatctgctgcgaagaccgcgaggtccgattcgaccagggacggagttcaactcgccattacatcgacatccttccggtgacgataaggagctcggagagaatcctttatatctgatcaaggaggaaattgctatcatgaagaaactgcaccacaacaatctggtgtcattgatcgaagtcttggacgatccgacagaggactcgttgtatatggtgatggaaatgtgcaagaagggtgtcgtcatgaaggtcgggctggaagagagagcagacccatacgacgatgagcaatgtcgatgttggttccgtgatctgatcttgggaatcgagtatctgcattcgcagggcattgtccatcgagatataaaaccagacaactgtctggtcaccaacgacgatatgctgaaagtggttgactttggtgtatccgagatgtttgaaaaagattcaaacatgttcactggcaagtcagctgggtcaccagcatttctcccaccagagctgtgcgtggtcaaacatggcgatgtatccggacgggcgacggatatctggtcgatgggagtaacgctatattgtctgcgatatggaaagctgccatttgagaagcagagcatcttcgagctgtatgatagtatcaggggagatcccgtggactacgaagaagaatcagatgaagaattcaaagatctgatgcaacggattctcgagaaagatccagagaagcggatcgacatgtttggtttacgagtgagtcaatcgcaattgcactgcttgcccatgctgaccagattcaacaggagcatccctgggtaacgaaggatgggacggatcctttgctgtcatttgaagagaacacatcgcagcccatcgagccaccgacagaggaggaaatgaactcggctattacaacaaacatgggaaatcttatgaccgtggtatgttatattcctcgttcgatagtatatccattaacaaggcccaggtgaaagcggtcaaaagattcaagcgactaacagatccgaccaaaccacaatcccccattgaaagtacgttcggtaagagcattctaggcggcgatcacgatgcctactttgtcgagccaccaatggaaatggacccagacgaacccttcccggccgtgggagcggctccacaaacacatgatggccatgacttcagtgcaggagtacgcaaatacttcggccggcgaccttttgccggactccgagacgattccggaggtttcgggtctagcgattcggccagtttttcatcccggccggagtacagcccgaacagcagcaaaagacccagcggcgtgttcgagcccgagcgaaaagactccggctcgatccgcagttggggatcggctcaaccggatatcggtcacgaagccctgccccactctcaatcgggatcaccccatatccctctttcgcgagcaagctcgggtagaactaagcgcagcttagaggggacgagagggcatgcccgtgacccacttgaggaggaatttccctacctcttcattgggccatctacatacaccggctcctcgcagccggaagcggttggtacggaaattagtggcgatccggggtccattctccaaacgttggaacattcaatggatcattctgaccagatggaggacgatgagccggtacagttcgtcagtgaatcgcccggcgctgccgatttcaatatctacgaaacagcatacaggaaggaactagatcgcataaagcacaacctgaaagaccgcgacaccggcccgaaggtgtacctgactcgcgtcattgagaaaaacagcgacgaagtggtgaaactggccaaagagaaggagttggatcttcaaactgggaacgaatttactcctttttctctgccgagaacatccctaggcttcgggcatgccgttaacgcggtacgctcgcagatgctgcagaaaagacaggccggggagttggaggagcagggtggggagggaagtaaagatagaggttcctcgcagaaccgcgagcttcaccctcatcctccgaaacgtctgtccgtctcatcccaggctctacttaagcctgagccgtcttcgctcgaggcgacaggtgtgtcgtctactgaggggaaagattccaaggcccagctgcggcggattcttgatcgggttcgtgggaagtctgatggtgcagagtgataggaggtgttgtttggatagaattgtgtgaagcttgggttctttgtatcgagatagcgttatattcaaggcatatgcactgccttcagcatacacatggcaaacttttttgaaaggagcattttcgtgaattctcgttagaatgtgtgtgagagcggcgaccatggcgggcaccatcacgaagtatggcctgtgaaactctataaaatacagaaagcgcggttctagactccaaggccccgataataaaaaaataaaaaagtcatcgccagtatgcgatccggcaacttgagatcaaacggcactcaagctgaggatggatggacggggatccatagtggcattgcgccaacgtcgccaacgacaccgctaggccagatgtccgtccatccattcatacatagtgtgcagtgtaatctagcatacgtagtggactgatacactgtatgagtctgaggctgagagtaagtaccgctttccattatacgaacacctgcgtatctttctctcggttctgttaaccagaactttgatgcaaaatattaggaatacgatggtgtaaagatccagtttcgaaatgcgcctacattagcaaaagccatgtttaacttacaaggaataaagaatgaagaacgagaacaaaaggatatatgtgtgatattaaatactctgaattcattatagactaggacaaagagtgtaagacatcatcctataaggagagtcgagatagaagggaataaacaaaaaagccaaaggccaaatccaaaacagggagccaaaacatcatcaaaatatcaaaatcagaagtaggataaaatacaggttaaacatgccttaagcagaaaaattggaaggctcaaagaaccgccatcgccatgtagtagcaatagacataatgcatcatcatcgtcatcaaatgcatagcacgctagacattgggctgggctggagggagaaagaaaaagcagagagcagaaaacagaaggtataacatcgagatagaagataaaaagaaagatgctaggcatggagggcatcaattggcgtaaacgtcttgtattgtcttaggtcgtggggcttggggtaggcttcacaatattgagaatgtgtgcctaggagacgaatggagagcgggagtagaaggaaagcagtggaagtctcgcttgcttgaactggggacgcaatggtgtgaagattcaatcataggaaatcgaatatcaataatatgaaagcattatcttcatcgaacgtggggaactcgtggacgcatcgatggatgtatgaaggtcactgtcaaggggagaagggaaagagaagcatttctcgtcttgtggtctatctgaccttaggtagattgtacctaggttggcagacacatgggcaaaatgagagagtgatgaattgtcgaagggagaaagtcggaggtgttgaaagaagtcgcttgaagagcttggagaaaaaccgcgcacaataaacacaacacgagaacgctgtctattgttcatcaatggctttatcattcattcatagcccttgggcctcaaaaaacaaaggctgaaatcgaaagtcgaaaataacccagactgggatcgaagtaaaaatgagaatgaaaatgaaaatgacgatagaaaaagtatcaaaatcaaatggtcatcgtggaggtttctcggcttgagttgtattcgttcgttccgagtatggtgctggctggtcaggccgagtgagcgaatcgcgccgactactgtctgacggggagaaccggtctgctgcaaagctgtagggccgctcggctgggttgctgaatctagggaaggcgtctggagggcctagttgtaaggcatgtggtgaagggaggggatggaccatctctgtgggccggggtagttcacgcatgttgatattcatgcggggtggcatatcgcggcgctcgtcatttggcgcgggaccggggccaggtggtaggactgctgagtgcatggttggagtgtcgtagagagttggggctgggcttggcttgggtccgtgaaatgcttggggtgccggcgggaatggtgtagacgatgggcctgccgcggggctggtcggtgaagaagggactttgagtctgcgagaccaccctgaccgtcggggggctgggtaagtttcaccacgggcctcggctaggagctttcgtcgctcggtctctgctttgcttgggcgtcctcgtttacggggtggttcgccgggggcgacatctagtctcggggagagctgggctgatgcgccgctttcgctgctgtaagaggcggtgctggctggtggccttggttggattgcacgagggattggcttgtcggaaggatgcaatggccgcttgcgcatggtgctagggtccattggggctggtgggccggtcatatcggatggtggtgggaatgaagccactggctgtgttggagggtgcacgggctgctgaaccatattgagataggccgttttgcacgagctgagtgaacgaccttgaccggggcaggtgttagcgccatgttgatattgatcaagctatccttccctttctttttctttggccggcaattggacgataataccttgaggaaggggaatatgctcccagttgggagtaatcccatattctttgatcatccgtactagatagctggaaggaaatcccgctttcttgaggatctcggtgagtagagtgcactagttcttggtcagcatcacattcacatcggctaaagaatgcccataccttgtcctcctcggtccatggcctatcggatagattcgacatatccagaccatggaagcggattatagccggcttccctttcccctgaaaagaaaagaaatataacgtgaaagaaagtaagaaagaaaaacaaaaacaaagaaagcctcccagatgatcccggaaacaggacagcgaacggcgtcaaggtcgtgatacacaattcagatcaattgatctctcatatatgttcgagaggaaaagcgaagagagcgagagagaaagaattaaaaaagaaaaaaattcaatcaaaagacacgcgccagagaacgagagggtgtcttatgtccccatatccttccacgcggagacgaaacaaaagggatgacaagagggaaacgaatgatctgacaattgaaggctttgtagccaaagaaaatgaaaaaagagcagccaaaccaaactccatgcaaaatccccaatttatttttttttctgggattttttccaggaagaatttctagccaaacggacttgagcagccgggatcgcgcaggagaccagcgttcgggagggaagctgcagggacgatgctttctggagagtgttacagtacaggttagaagaatctggtaaagtatataccacaggtgaatagaaatgggggtgtttcagccgggccaagtttcatattgttttccagaagagtttcgaagaacgtgaaaaaggcaaaattaccactaagaagaccgggaagcggggagattggatttctgattcctccgaaagtacaatcgaggggttgaatggagtgggggctgcattgtatcgaacagatgaggtcttctgcatagggttgtatgggctgggaatgcccaggcaatataatgtataagataggcttagatctcgccgaattgcatcgttggttcgggaaacggttggccctggcagttccagaaccaagggacagtttgacgaagcgttatattttctttttttgggggcaattttagtgcatgattttggtttcgtcgggtcttctccagcaaagagtggaatcatggagccgagaatgggatttgataggtgccaacatgggcccgggacattgggacgccccaagaaaatgcagaaaatgcagtgaaaaatgattttgtttgaagctagcctcaggggcggttagagtgggcgatcgtacagagaaaaaaagcgcgtctgtcatgcagcgggttctgatgaaaatggggccagaacgattggcagagatgagccgagtggagaggcggactccgccgagatgcagccatgaggttcttggtaaaatacaggtaattgattaggggggaatggtgaagatggtggagatgaagaagatgaagaagaggagagaggatgaagaagcacgggattatatagaaggacagcctgaggcagggagccctacaatatcacatttgatatcacatcggtatcccatgcgtattgtgcctggtattatcaggaacagtatcatgatacagcgtatctgatgtgtaatccccgtaatctatgtcatccatatactaaaccagtttgaaacgcacagacttccacgttgacgaacaacacacatgcagacgcgccttttcctgctttctcctccaatcgatttcataactttcacgcttttggattttcttacatttccccttgtctggtctttcttcgtttccatctatatcactttaggcttatgctgaccttgaacaaccctgtcacagttcccgtgtggaaatcaccacataaatgttaaaccacaattgggattgaggaatgactatggtcactctcccactactctaccagaattggtccatgcctattccaggtatgctctttatgagcctgagtgggaagtgaaatcaagaccactataccataccacctatacaacatacaaccaccactggtgaaccgagatgattcaggtctatacaagacagtgagagtaggctcaaggcggtgagacaccgaaaatgacaatagcttcgatttcagtcaaattaggagatttttatcaatgagattgtttcttaccttgaccgctctggaacccccttgattcccgagggcatatcctggcagaatcgtccccgaacttcgtattctgctttattttcttcttcctcttgctctatctctctctctctctctctctttccatatcttccaatcgtagtccgtgttgtcatgtctgcccatggccacgcggactctgaagaggctcctgccaaaatggagcgggactctccggtaaacggcattcatttgaaaaacggcgagtcgcgtacctcatctcgatctcctctccctccgaaaaaagagtcctcccccaactccgacccatcccatacaatgaaggaaaacgttggcgacatcgttcttaaacgggaaccgggccaaccgctcaagctgtctcgcagctcgtcgcaaaaagtcgcgtcgcgacctccgccgctgtacacgcacctgccagatagcacccaggatgcgctcgccacctttgaacagatccccggctgtacctacgccaacaaatatatgggctacaccgaacatgccatggaatgtgattgcgctgaagagtggggtaagtttggttttcgagtagcctcgctgtcttcttgcccgattcccggcctgatggaacctccacgagcatatcactgatccactctgtagatccgaagattggtcaaaatatcgcatgtggcgaggattcggattgcatcaatcgcgcgaccaagatcgaatgtgcgggcgactgcggctgtggctccgactgccaaaatcaacggtttcaaaaaagacagtttgcaccagttgccgtcatcaaaacagaaaaaaagggtttcggattgcgcgcggaaaagaatctcgacccgggcgaattgatttacgaatatgtcggtgaggttgtgggagagcagcaatttcgaaagcgcatgagacaatatgacgaggagggcatcaagcacttctacttcatgtccttgaacaagggcgagtttgtcgatgcgaccaagcgaggcaacctgggccgattctgcaatcactcgtgcaatcccaattgctatgttgacaaatgggttgtgggcgagaagctacggatgggaattttcgctgaacgcgcggttcaggccggtgaggagctggttttcaactacaatgttgatcgatatggtgccgacccccagccctgctattgtggggagccaatgtgcacgggattcatcggtggacgcactcagactgagcgtgcgaccaagttgtccaatgcaactatcgaggctcttggcattgacgaggcagatggttgggataccgtggtggcgaaacgccctaagaagaagaagatggaagaggacgacgaggagtatgtggacagcgtgcagcccaagtcgctggatgaagatggtgtgaccaaggtcatggcggctcttgttcagtgccaggagaagtggatcgcggtcaaactgctaggccgtatccagcgctgtgacgatgaacgcgttcgcaatcgcgtggtccgaatgcacggataccagatcctgaactcccagctcgctcaatggaaggatgatcagaacgtggttctgcagatcctgaacatcctcgacgggttcccgcgactcacccggaacaagatccaggactccaagattgagacgaacatccggccgttgacgacctgcgatgatgagcgagtcgcgaagaaagcggccgcccttctcgagagctggtctggtctggaagtcgcctaccgaatcccgcgcatgaaacgcggcaaggacgcgaagcaggcaattaaccagttcgagcgccgcgaaactggacaacagcagcgccagcgatctcttactcgctctccgtctcctgtgtacgatgctcctcgtggaccagtgcagcaacgaagagaacgaggtcctcagcggtccagacaacccaaccgtcgtggccctcggccattgcccgagggatggtatactgcggaggcggatggccgcatttactactactctgcatcagggaaaaccacatgggaacggccaacgttgcctgctactcctgttactcctgcgccaggtcagcctgctaaaaatcaacagaacttggcattgcagagtatcattgatgggattatgaacacccaggaggacacaccctccgagcaccgaactgatacgcccgtcactcctcggccttccgctgatcaaccggagaaaagacataaagatggagagaagtggaggaagcttccattggagaaacagaagagaatctacgagaacactgtgagtattcacgcaaaacacgagatataactagactaacatagcacagcttttcccgcatatcaagcctgtggtggatcaatacaagcataagatccccgaccatcatctcaaacgatttgctaaggaggtaagctcatggtcctcccttcgattctttctggtgcgatttcaatttgctgacatcctcattaatagaccgcgaagaagctcgttgaaagtgattacaaaaataatcgcgtcaaggaccctaccgcgaagatctccgcgaagcaccagcaaaccgtcaaaaattactgcaagaccttcttccgcaaggcggcagccaaatacgtagatcgcgagaagcaggagggcgagaagtcgcaggacgccaccccaaaccccggaagcgaggttcctagcacaggtgacgatgaagctgtcgcgggtgcgtctgcgagttctcccccggaagacgatgacgcgtctctcaaacgcaagcgaaacggagtcttgaatgtcgacggtgctgaagaaggagccgcttctccctcgaaaagacagaaatctacacccccaccgcctcctcctccgccccctccagcagatctccctaaagaagatggtgatggtgataccagcatgggaaacaccagggacgcttcatctccgaaagccgagtcgggcgctggagtcgacgttgccatggaggtataggcaactcctgcgcgtcttgtcttattttgtgcttctgcatcaatacccaaaagcgagtcaaaaagcgagagaatcggaagaaaatggagggattaaaactgatatctcagtaacctacattacttttgcttctaccgtgttctttttgtgccttttttacctttcttatttttttgctttctattgctttctatgctgtcgacaatacccccgagcccaagtgccactatcatagtttgcatcaattcagcccatcttgagctgtaagcttgtcttttaggagatctatacctctaggcggatatctaaaagtccacaagactaccatcatgatcgatatcgatatgctcaagtgtcaacatctatatctcgattaattttagaaaatctttttgatactacacactccatccatcatgcataattcattcgagtatatgcaaagcacaggcattacagactcccaaagaaaaacccatcagaccgaacagagagcagagaacacagagccgaacaggggccccccaaaaaaaccaaaggaattttgccagtaactttgaaatcaaaaaatcattccagcgtgaaaataagaacaggaccatgtaccgtaaagagctcaccagaaaaagttgcaagagacaaaaatctagtagaaactctccacgatactatccttattgacaccagccccggcggcgccgccgggcgccatctcgccgagtcggaacacggactcgataacgctcagctcagtggctgtggtgtcgaggccggtgatggcgagccagtcgttgacgaccatgccggcgccgacgacgggggagccacggttcacactgccggccacgagggggacttgcaggagcgaggagagctcgtcctggtcgcggattgaggtcttggggtgcacgattccgccttggtttgagagggccatgtacgagcctgtgaggacgttgtcggctactgtttggcggaagacttctacgccgaggacgtcggcgatgctaggaaagaagatatgttagttttggaagaagaaaaaaggaaggaagtttgggatggatgaatgcgttatgagggctggactcctactcacatctcctcagtctcacgctccagatccgggtgcacgattgcgacgtggtcgttgcagcagataacattgccaagcgcggaaaggcgctcttctatgcgttggattttgacttcggctggaagcgtgttgcgcaggtgttgcaattcttgatctgtggtggttgtggggacgaggagacctttgcggttactagaggcgagatattattagcatttgtgtttttcttgataagttttcctttcctgacaggaaaaaaaaggctgttcattttgaactagctatggccgactcacccgacgattagacggccgacaatgcgggttccggcgatggttgcgtggcagatgggaatgacatcttggagttcggattcgaagacactgcatttgagtgttagtggtagttcctgagtggattggggtagaggctagggattgagattgagatttgaactggcacagcattggcagtgtctggatatgccttagcaccacccttcctatccatgccagtcccaagtcccaatctcacacccttttgaatatctgaacgacacacctgtagaagttctccgaagcaccaaccgcaacgatagcgtaggcatttgtcaggcaagagaaaacgccgaccctagaaggaaaccgtcagccgcagcccccgagcgttcgttctttgcttttgggagatcctactcgttcgagttctcgaattgcgcgcgaacagccataatggttagagtatcagaagatgttgcaaagagcagagtgggaaaaagtgtgcggtgaggagcggggtagcgaaaagcgcaaagctagcagatgcaagatcaacaggaacggaaactgtgatctagaattagggaattcaaggatcgagtctaagatttgcagaatgaagccgagataaataatttggcagagacgtgcgatccaactgaaaaaagaacaaaagctcgagccaattagaggcttcgctgagtttgccccgccggagccgcagaggcgagttggtgggttggaaatatgtaccggtactcattttactatgggacaaattatggtatactatgtaccgctacttaatttatactgactcattctgtctcatcttgacggtgattcattctgcatacaacatagtctaatattccaaggtttactctaatatcagtcatagctacgcacagccatgcacagccacaagaacaaaacataggcctggctagaagctagaatatggctgatgctacagcatgtcaaccctagtcatcttactcatccttgctatagcccagataccgaagtgagaaatcaatctaaatcatcaaaagtacgtattggactagatctcgaagggtcactgcgcacgcgcgacattagaggaggcctaagcttgcgacttgccagttcgattcaagagaacgagtgcatcttcatcaagatactaagtacagagagaggaaagaagaaaactatctacaggctgcattctcctggttttgtgcggtcttcttcttctgcaaaccatgcaaaatatggaagctcgcttaggttcccttccaatcgaggaaggagcgattctcccagaagcagaaggtacagatggagtacgaggccagatcgtcatgcagctgactacctcgtacatgtatcccaagagttgaccgctcccaaagtatagccaagccggcgcacagaactgccccctctcttttatgatagtggcagttttcgtctttgcgcagttggacccgcctccattgcctttgtaatgtgtttttgcaagatctggatagtgtttgatgtggttttcctgacataatttgcaacaaatattcatcgccgaaagtagccctagagccactatgctttttctctggagttgctggatttctttctgccgaaaccagagatcaggagattctggtgtatacgttgatattcgcgtcatctgttcgcgggatggagacgccgaacatcaggctttcaggaagcctagtccaggcattgaccaatagaacgaatggaataccaacagcgaaaatggacatggggatttgctcgaaggaacttccgaactgtccatgcacaagcgcagcataaaatgctggcgcaaggtatccaaagttaactatgagaagaaagctatcttcttcgtcctgtgatatgataactctgcctctaccagggtatgttgcagagccagcatgtgtttcttgtgtatcatcccgataccagccagctagtacctgggcagtgctgccacgaacctgccgaagggataaacccgccgccaagatcctcgagtctgaagggtagaccattcgattccgcatttatattcttcctccggtatagcatggaatcgagcgggagattactccaattatggagttgtaggactaggaggcgaggaagagaaaagtagctatatcgatcaagttctcaacataggcaacctctgcggcgaaaagagccatttgctttagcgacgacatctcgatgaatgtctcactagtagtaggtgcatcctttctctttcctctggtttcctcgggaaagccatccatggctcttgcgcagtccatatcatattgccgtgttgatgagttacttctttatatccgtccctccaggaattccaggagaatatttggcgacttggtcaagtggtattggaaccgggcaccgaaggactgggacatatctttccagtcacgcaggagggcgtgacatcaagacgttggacaaccgagcttcctttccatgtttttcgagcgggactgcgtactctaaacaatgaatcccattcccaagtatttgattgtggtggccatattggcctaggctctgctctgagttgttggacctcagctcatggttgaatatagcggggaattccatcgtcgatgaatccagttttatggttgattggcttcgtctcgggagttggattaatatttgtatatagagtagcagagttccgcatggcttctccagatagtctgatcgatccggcttgatgatggcccgttctgaaaaccaaggggtgatcttaaatccattgtcatcgatgatttggacttggattagagccatttcgcatactaccgatccagaggcaaggccgacagaggcaagccttcaagatctgcatgcaatagtggaatcaatccactggttgccgtcatcatgctcctcaaaccagtttgtaatagtgctggcatcgacttgaagtgaagtgcctccatgagaaaaggtctcgagaagtcttcgatggctggtgggtttttgtatatgaggagttatcggcacatgcgagagaagtcatttttggaagctaagtttgtctggtttgtgtcgtagacgtaaatgatgagtgaaagaagtgaagggggtaaaaaaggtgaaagagaagaaacaagtggaagaaaagaaagaggtggacaaagtggaagtgagatgggataaagaactcccagtcaaaacaattctggcgtcttctctaattaggacatcccttcgatgaactctctcttgacttcatttgaatctctcacttttctcacttgctgcttactttcactttactttcacttcagatctgatctgttttgatatcacatgtctcttactctttccttactacaaaacccattcaaacgagaaaatgtattcattctgatgccctccccccctatccccactcaggggggaggacatcgcaactaaacgtacaaaaaaagaattggtatcaactgcggggaacgctcacaaacatcttggtacaagccggcgggtctagtacccgcgcggcgggggcggggggggcgcgccgggcggcggcggccggtagtatcgnnnnnnnnnnnnnnnnnnnnnnnnnnnnnnnnnnnnnnnnnnnnnnnnnnnnnnnnnnnnnnnnnnnnnnnnnnnnnnnnnnnnnnnnnnnnnnnnnnnnnnnnnnnnnnnnnnnnnnnnnnnnnnnnnnnnnnnnnnnnnnnnnnnnnnnnnnnnnnnnnnnnnnnnnnnnnnnnnnnnnnnnnnnnnnnnnnnnnnnnnnnnnnnnnnnnnnnnnnnnnnnnnnnnnnnnnnnnnnnnnnnnnnnnnnnnnnnnnnnnnnnnnnnnnnnnnnnnnnnnnnnnnnnnnnnnnnnnnnnnnnnnnnnngtgggcccgggtgggcgtgggtggggtgggggaggagagcacggtggtgcgcgccggggtcagttcgcatcattggcagatgttggggcatgggctcggtcagagccgcatctgccaagatggaaagtgcccgtgggtgcacggggaaatcagcgctgccatcgtagctgacgaacttgccagctgtctcttgctctcggatgaaggaggctgcattcagcatgccgttgaaggcatctttggcgcacatgcgcagggcatcttcgtcgctgatttctgtttctgctggtgcgatctcctcgttcaggcggcccatccgtactctctggacgaactcctcccatccctcctccgcggccacaaagtccgctgccccctccgggtctcgaactgcttcggctgcaaatccgcgctctacctgtcttaccgccgtatcgccgtctcggaaaaggaagtgcttcacggattcctcggaatccgatgtgtcgtactggggattgattagctgggtattcgtttgggaagtcagcgtactaacctcggtgtgttcatcatcctcggccaccctgcggccttggatcagggccatcatcttgcccataagcatggtaaccatctcctcttgcatttgcttgatgagcagctgtttccacggttagaattcttcagtgatacaacttcgatccaaacttacatttgcagtgtctttgatgatgtgaacttcgcccacatatttctgagtctccagctcagtgttcgccgtgtactcgatgttcaatttctcagttgccttgcgttggtactcatccagatcccgctggacttgttcgaactcagggcattctttgtgcgcatttttatcacgggaaagcttgtgcacggtctgctcggccatgaagctcagcgcaatatgctgtgcctggccaaccttcttgaagagcgcagacatttcctccttgcgagattttgtcggcatggactctggcgtaggcgatggggtgggaccacgccagttttcgttaatgtcccagatctcgtcttcgattttcttgccgcgtttgatcagagtagccttggcacggccacgtcctcgaccgcctcgaggcttggtaactgctgcaggtcgaactgggccgacgaatccaccgcggcttccgcgaccacggcctcggccacgtcctcgaccccggccgccacgggctcctcgacctccacgacctcctcggacagcgctgtcggcaggggggtcgaattcttccgagggaatagggatgtcctcgggagatgtttcattctgagttgatatctctgtgccatttaagtggctttctggagtctcttcgagctccgtctcatcaatccgcagctttttgttcacgcggtcctcggaatcaatatccggagtttcattttgctgttccagtgactttcgtttatgcagtcggggtgaagacacctgattggaaggcgcttcttcagtctgggaaattttgggactttgacccacgggagtagctcccggcgacacaggggccgaagcaaccatgcgaggttcaggggattgagatactttttgaaagggaggttcggacttgaattcctcgtcatactggtgcatgtcatcatctggctcggtgatctgattatcaacggccttggttggtgagacatcttcttcgaaggagccctctccatccggcttcagtcttgctgattgccgggtggtccgcgaggactcaggaacagtccgaggatgccgaggacgccgcatgcgaggggtctctggattttgcgagacggcattgattgcggtttcattttcattttcgccatcatgggcatcatccgcatcagcttgaattagtttgagtgaggaaatttttaatttgacgatgtgcgagcgaacttcaggtctgctcggtgattcatcggcaggaagatggccaggaagactaggaacgccagggaatccagcgcggccacggccgcgaccacgtcctcggcctcgacctcttccccgagtagaggggggagtgggaatgatatctatacatctcagagattggaccgatggcgcagagctgtatatgaacataccttgtgcagtgcgtccagatcgcgtagaaatactaggagtcctagcagcaggctgtgcagccgcgcggtttttccttcttcccaccatcgctgttggtctgaagaaaattagttttgaacggggaattgatccagtagcagcaagggggaagcgcgggaaatcagggtggtaagaatgaacaggaaaatgagatgtaggacacagaggtgcaatggaagcaagttcccaagctcttcagtaggaaaatagtagaaaagggcaaagtacaagtcgcgtttccaaatgcagaatggagaaaggaaacgtcactcttgtagcaatggagaaaaaggcttggcaggaaaagcgtgaagtagaggtaatacacgtcccagatcagaagaagcaaagatgcagagatgcagagacccgaagatcccagatcccaagatcctaaagatccgacgaacctcacggtcacgatccaggagacagggtttaccagcgataagaaaaacaaagtgtggggagtggaaatggaaatggaagggggagacagggaagacgcaagtaagaacctaccaaagcgacggatctagcaaaaaaagatgcgaagtaatcgaaaacgcagagatctactgcaggatttgaccgggtggatggggaaaacggggccaagtaagaaaaaaaacgggggggagagaagaagatgcgaagaggaaaaaagaggttcgatggaataagacagggaaaaagggccaaaacaaggtgattaggagaagttggaaccggcgtctcacacaattcaagcaacgggatgtgttttgttgaatcgaattgaatcaagtcgaagaagaaattgcattgttctgattattgtgtattcttccattctatgtctattgagcccgactttgccgctcggctgaggctcggaaggacaatagcatacaccttcaatacatgactatattctgaatagaatacattcattccctctacaactgccttggaacaatagagtctataccatcatgtacgtgtatcgattcccagccacttccggcatacgtacgggggtatttggcatggacaggtctacgtatagttactataggtatgctgatattgtctgtctatttatcttatcttcaatagactattcatatactgttcatatctattcacatctattcacatctattatccttcttgatatcttctatagttatccccttcccctaagaaaaaatatacggacccacttaagtctaagagtcggtgacaacaacgcatgcggatgacttgcactgtagactatatacatattgtatatattgtacgtactcttcatgctattactttgattctatgagccccagctgagatatattccggagtatcttcagataatgtgtctcttcaaggcacgctagtccacgtcatccctagctacggagtactttgtatatttcctttttgccacaaggctgtcaccaggccattaattaacatggcatcattctcaagtccatcaggagtaaaataaacttccaggtatcgtataataaagcgcaacaaatacgagtgccaatcagccacattactccgcactactcatcgtcgaatatatactttgacgcattcagtaactatatgccgcagcaagatccaattataccatccgtccattccctatgtacacaaaatatatccaaggatccacccatatccatacccatcatgtacaaaaaagcaaaagcaaaacaaagagcaaaaagcaaaaaatcatgcagatcaaatataccgaggtagatcaatcacttttcataaggggattcgttcaattcatatctcttctcggaatgcgaacgagcaaaaccacgagtcggcctcgggcggaagctctcgtccgactccggcaatggggagggcgtgcgcatcgcctggtcgcggagggagcgggcagaccgcatgcgcgtgatcgtgccggccgtgatagtctgtcccgcgctcggtgaggccttgaccattgtgcccggcgcaaaggtgggcgatggacagggactagttgagcggaagagagggtggatgttgttctcgtcgaaggggttgtattcccacgttgagctgttggagctggactgcgtgggggagtcgacgcggattgtcgacgctgttggcgacggcatggggtgcactagccggtctaaggagagtgcgcttggtgggctgcggcgtaggctgggcatgctgcggatgctgtgggtgccccggggcagggagcgagggtcccggtatgggagggtgtcgggctttttgtcctgtgttggggatgggctccgggaggtgcgggttgaggagctggtgtcgatggacgcgttcttctcttcctttgtgctggaaggacagagtgttgcgtcagagtagcggctggaccgccgggggaatttgcggagggaggatcttttgggctcgaatagctcggacaagtcgcatactcgagggggtgatgggaggaaagtagggctttgggggctgtccttgagctcttgcgagttgatatcttgagagtgggcacgcggccattcagggttggagttctcttgggctagtgttactgcgagatatccgcagtacaagccctgtgcgaatactgatagtgcccagaacacagagcgaaccacgaagatcgaggttcgaaggctcattgccattgccccggcagatgctgcggcggcaacaagtaaatatccaccggcgacatacatgcattgtcgacggccggttgggatatttcggtggtacagtagaccgatggcaatcaaagccacgcagctcactgcacttaggatagtcgaggccacatcgggcgaagcttttgattttgcgtagcagataccattcagaatggtggcaatgaatgtcatgaacaatgaggctgctgccaacgagtaagataggtaagacatggcgaaaagagaacgatttggcaaagaatggcctggaagtatatatatcaaagagagtaagagagtggatatgtcaaacgttggcaggctgccaatccaagacgtttaccaatgcacgaaatgagtgttaggaatctgcagactccatgagagggaagatgtctgtatttatgagtcgagcatgcgtcgatgcaggagatggttcgcaacacgggacggggcaatgcggatctcagcgtggctcaaagtatatcgaccggggaagcagtcggtgtcaacctgtcaattcttttttttcccaaaggagccggtctgatctatcattccggcatggtggttagactttgtatataatcggctttgacagggatcatgtcgattggcctaggcagagcgatcccgccggggatgcataatgtgtgtggatatcggcaattgccatctttctagccattgaggcgaagacattgcgcttaattctggggtagccctatcctgtcaggactcagcctagacccgtcatgcagaggaatccgatagtctgatttagtcctctgcacgccttcgcatatatctaaaagacgtaaagacatgagacacacaaaagagcatctgacaatatattggagtgttcttacggagtacattaacacccctaataggtatcatcttggacccgacaaacacactatattactgaaggattactacgtcaaagacagagcgcataggcgactattctcatttctttaatctcactaactgacactatttaatctgatccatcagtcttgtggacaccaccgcccgattgaggtggcggatcctcttcgatctcaatagtgcgggccgaatgtgatgtgtctctctcccttgcaagagaaaatctccgcgctcccctggatctcggctgaaccagcctgagataagttagtgcgaattaggcagatcgaagattgtactttgtagattttatagatccatacttcgtagtagctggagccacgggatatcttgacctgtcctgcaggaactatggagtatacaggttgaattgtctgtttccactcttccggaagaagcctgccgcatgccattgagagtatttgtcagttttaattaagagatttgcgtgttctgtggatttttcatatgtatcctttttccgtgtgggtacgatatgtgcaatgtgcaatgtacagtgtacaccctccgtgctacttactgagaggcaatagtggcgcttaatactatattatacaggagttcggaagtaccgagagttcattgtagagaggacttcgataccattgcagcaatttgggatatagatttgcatctccaacctgttgactccagatgtctgcccaggtgggatgttgtcatccaggcggcaacaggcaaccagcttggaatcaaataatccgatgtacacatatgtacacacatagaccgggagagagctatacacaatatggagcctataatagctgtcaatatcaaaacttcctttcaaaagttaccctggcaagttgacgcaagttgtcatgatcgtggtagttgagtagtggaagtaaatccgaaggcggtcaccgcactcgtttgctatcatcgtcactctgaatgctcccctcctactttcttttcttttcttcgacttttcttcgactacatcgctgagaggatcctttgcatcaagtaatctccctctctcctatctcaatccgtcatcttttctccctatccctttgctccctggttttactcaaaagcggcaaaatgaagctcactttcaaggtacgaaaacttgctcttggggtcctcactgctgcagactgctgacagtcatcgattacaggatctgaagcaggagaagtttgtcatcgatgtcgaaccttctgaaactgtacgtgtgttcctgtcgctataactacccatcgtcatctagtgcggggctcatctgtttaggttcgcgaggtcaaggtcaaaatcgcccaagagaaaggcgaatatgaggcagagcgcatgaaggtcatctactctggttcgtattttcccccttgctagacggattctccgttcacggtgctatggctaaccttcgctttgttccctttataggaaagatccttcaggatgataagacagtcgaatcttacaacatccaagaaaaggacttcctagtgtgcttgccttcgaaggtataggttaacctggtctatgatttccgagccagagctgacatttgatgtagcaacccaaggccgcctcatctgccgcttcctcccaagttccctcgaccccggctcctcgagctcctgtgtcaacgcctgctgctcccccggctcctcatgctgccattgctcctccctcttttgccgcccccgcgacaccttccccggccggtgcagctccagctccagcgagcggtcccgctttcggagacccttccgctctcaccatgggctctgccgctgagggcgcagtcgtccagatggaggcaatgggattcacacgtaccgatatcgaccgtgccatgcgcgccgcattctataaccccgatcgtgccatcgaatatctcctaaccgtaagcttttgttggaagttacttcttgaatgtttgctaatgatcacgacagggtattcccgaaaacatccaggaacagcaacaacaacgacaagcctcagagccagcccctaccggcgctgctcctgctgcccctgctgctccttccagtgatgagccgcacctcaacctcttcgaagctgccgctcaggccggtggtgaaggtggtggccgagctcgcggtgctgctggtgccggtgccgctggtggcgaagctctcggcagcctggagttcctccgcaacaacccccatttccaacagcttcgtcagcttgtccagcagcagcctcatatgctcgagcccatcctccaacaggtcgccgctgggaatcctcaaattgcgtcaatcatcggacagaactccgatcaattcctgcagcttctaggtgaggaactcgaggacgaggaggctgccttgccacccggcgcgcaggccatttcagttacggaagaagagcgcgatgctattgaacgtgtatgttgaaacttcccctcgatctcatagttttatgactaacccacaaccagctatgcggtctgggcttccctcgcgactccgtcattcaggcctacttcgcctgcgacaagaatgaggatctcgccgccaacttcctcttcgaccagcctgacgaggatgagcagtaaagaattattgttctcttttcgacttctcttcctctcctacttttcccctttaacgttatgttctatgatgaataccaagcatgctgctgtttgaattgattcccatctctcctcaccggatcccttcccatgaatacgactcagtgctcagctagcgtgtctgagttcctgtttgctgagtgtgtacttggcttctttgcatcccgctgttccctttctccataacgcctgttatgtatttagcttaatgggaaaaatgggacttgttcgctgcatttggagtatgagtagtcgtgtaatgttctaggataagtggcgatcttcaatctggtcatctgtcatggtgtgattttcggtcatgcgtattttatatgcaggtagactgtgcagatgacctgcgaatagtacaaggtatccgctttggagaagtctatatatatcctccacttggtactaggccgcgagacccgccaaatcgtcataatatatctccacccagcattccttatgtcgagttgatatatacaacagcccttattgccattatcaggcaacattccaagagtatgaatgtatttttcgaatgtccgtacaaatattcaaactgacaatgcgctacccgcataccataacccagctgaccaacctacaggaataaaaaaagccattgaataaattgaacatggtactacttacacgtagtcatgtagaggtaagtacaagaccagaacccccaaagatatcaactcgaatcacgcccatccccaatgcaaaaaaggtatctcatagacccaggaaccaaccctaacatgcaccgaaaatattcagagaaagagaaagaaaaagagagaggaagagagagtgctcaattcaaatgagaatgtacataatgcatgtatgtagtttcccaaatacacaagatgaacaaaaaatacaacgccgcatccatggacatacgtagaagtacatccatgaacgagaaggagaagaagaagacttatttgcaagatctctgcacagaccaaacatccagcccacggcgtccaacgacccgtttcagagtcggcaggatcccgtcgtcgccgaagtccatgtcatcgaggttgaggtggttgcgatacgaccacagttgatggagctgcaaggtttggttttgggcttggtcctggtcttggctctgaggcgcagagaagacgtattgatcgaggaaagtagccgatgtaggcgcgactaggaacacaggcgatggagtagagcagccgggtacaaccagctccagctgctggatcatatccacacctgacatgcccatgagatccagcgtctggatttctgtggactggtcgtctccaccgagaagccacagcggtggggagtatgtcttccaccagaacaccgttgcggatggtatgtactgtgttggactagatgagacaatgtcgcgcattgctagctgcgtgggaacgatgccgccttggtggtagatgcccataaggaagcccatggctgcgttgaagatgacccatacaacaacgaggaggcgggagccgcgcatggggaagcagctaaggaggaggggcacgactgggaggaggaagcgtggttcttggtgcgggaagagggagaggagcatcgttgcagagagcgcggagagggcgcgcacattacgcatccagtatggtactagcggccggctgaaaagggagactatcattgcaatgtaggctgggccgaggagttggaggaggtttgcagtgaagtgttggtagtgggggtggaggccgtgctgggctaggttggcagtgtcggtgttgtagaggaggttgttgaggggagttattatggggtggcggaaaacgctgaggaaggaggcagttggccggtagaagatcgtgtctgtgtaggtggcgatgaaggaaaagaagagaccgaagaggaggaatgctgcgagcccgagtggtctggcgcgaaggcggggttagcacatgtgtattgatggatgagctggaggtaaaatgtatgtatattgacgcacttgcgctggaactgaggcagcaattgcagacccgggaagagaaggaaagccgggaaagtgatgcggttgaagacgcccactacggcgatgaaggcaagcacggcatgggagaagaaggacgagtgtcgctggagctaaggttagcatggatggtgcgctttggagctttatctctcccaccttattgttgacaatgcgccgaatcaaaaccagcccccaggcaaccaacagggtctcgaggctgttggaaaatgtgtgcgtctgatacgtccaggtgacatacgacgaggccaccagcaccactgtcgcgcgccgatgacgcggagaaggcactagctcatagatcgcccagtcctcgaggacaaaacttaataggaacattccaccgcgcagcgcattgtaaatcatgtggggtggggggctgccctcgccggtctcggtatagaaccatttcaagaggttcattggaagctcgtaggccgcccatattgggaatatgctgcgaatggggtgttcaacggtgaattcccatggtatcttcgacggaaatgagaatatgcgacctgtattcaggcgacttggtcaatgtttgttcttcgtataggagagtcgcggaattgccggatcgcgctgttttgctttctgctttagggaaaatcgcaacaaagagttcctcgcgtccgtatagtcgcagtatgatcgcgattggtggggcgatcattggatagttgaacatacctgcgaaaagctctggaccttggaaattctcatcaggatgtagatagcttggagacagcgcaaagtacacccgaatcaccaacaacagtaaatatgttcgacgccacatggttggagaaatctaggaacattattagacgaaattaaagaatgaaagtaaagaatgaagtgaagggagaaaggagggtgggctaacactaacagaaaagaactagacgcgtatcattggatgatatcactgtcgcgttaagcggcaaattggagcggagattgtgagaggcacttatagatctattactgtgagatttacattgagatatatctgtcttgatctgctctgatcattgaagcctagagagtctgttttgaaagtgacgtaatgtttttcaccaaaattgtgcacgacttaggcccccaaggttgttctggcgctccatgagaagtacgagtaccgccagactccagactagtctgccgcactcgggttcggaagtcccctgcgatagtacagcccgggccacaacagtcactggccattgccgctgaggatccatagatgaagtgggctgttccctcgtattcttattctcgtattcctatgccgaatgccctaacagcggttccgtctcccttcctcgttatagcggcttggctcgaagcttcaaatcccctagaccacattggatcgaaatattattcggcttggtcttggcatgcatctgccagcaccgcagagtggtgttgaattcccaagcgagttggcttcttggcaggctgctgctgttgatgtatactagggcatatgcgaccggcttgcctggatgaacaggcgtagatgatctagtctgatctagcttacggtcgccggaagattgagatcgcatcttgactcttgccggttgcctagagaaagtaggaatggctgaaccgacgtccatctcgggtggattgcgtgccgggccggtattaaaggtggacgttcttgcacctcatgtgtcatggtaacatctctgttgaagaggtatcattacaggccattgttgaagccaatatagttgatctggctatgtcatcgacaaagcgggagcggttactgtgctccgctatgtaatgctccccaatccacaaacgagatttgcacttaaggagtggtggtggtagacttcggggaaccacttttcgcagacgttctctttttgcgacattctctgtttatagacgttgtcttttgtagaagttctcttttcatgtttcgcggaagttttcaaaggacgcaggcgaggtaatagagaagctctgccataaaacaaacaccatcgctcttatatttcattcataaaccgatttgtgagcctaatgaggcatactcctagcccttttatatagttactgttctactatgatggttagtttttctaacacgttactttatgctgtgacatcatacaagcacttattgtacctctttcgcgcttgggccattcccaattgtgcttcactgcagcgaccagcccttaaatttgcccgcctgaccagaagatatcgtaaatctgtcctaattggaaggaatcgaagtagacgtagtaaggcgacttcctatgaaacacatgtttgaagcacgggtctgaagtgttcccatggatagacggattttgtccgtaactactttaggttgactagaagaggttgtagtttgttcgtgtatggataattagaacagagcaggatcatatccggctggtcaaatccattttcaatagggttgtctttgagggaagcctcgatgtcgatatctagatccttcgagaatatagatccatacatgtttagcttagtacttggacaatctactccgtacaaagaatataattcagaaatacattacaccttttaccaaaatacaaattccagccgcccagattcttatttcagcccgtaaatacggacagccgccgttggttctggcttagtacggagtcaagccagcgcttccaaggttgcattcccaactgttggctcaagtcacaggctactagtctgtttttgaccaggttctcgtttctttaaatcaaaagaatgagtcaaagcaaataattggtctgatttaggcaacggtccgaaactaagacgtgggggctggctttgtagccttgtgagccttattggctttatggataccgaccgcctttggtaacttagaactccctaaacctcatcacccgccatctactcgttacgtcttcgtcattttcaacctgcaacttctctcttcagacacaccaacttcgaaacctggatcttttcgttcaataagcctacacctttccacgctttttctacgcttggtcagtaacatcgccaccaccgaacgccccgcactactcgaaaacgaccagcaacactaacttcagaacattagaacccatctccaacatcataaccatgagtgctatcaccctcaccagctccgatggagtcgatctttccgttggtaggcataatttccacagcagtcgcgagtggagctgacagattccgaacagaacgcaccactgctgagcgctccgtgctgatcaagaacatgcttgaggatctcggcgactctggagaagccattcccattcctaacgtgagtgtctatttccgagcatagccaccatccaagatcagccgcttacacctctttgtccaggttaacgaggccgtcctcaagaaggtcatcgagtggtgcgagcaccacaagaacgaccctcctagtgctagcgacgatgacgacaaccgtcgcaagaccactgacatcgatgagtgggaccagaagttcatgcaggtggatcaggagatgctcttcgagattatccttgtacgttccgtttgcagacttgttcttcggtacatttactgactgttcataggccgccaactacttggatatcaaggccctccttgacgtcggctgcaaaaccgtcgccaacatgatcaagggcaaatccccagaggagatccgcaagaccttcaacatccagaacgactttactcctgaggaggaggatcagatccgccgcgagaacgaatgggctgaggagtaagttgccaccaccgtatccattgattgaatctatgctgacatcctgcgctagtcgttaaatgatgataatgtgtctgttctctctttttaaaacagaaaatgatatcctcccggctgtttacgacaatgtgcagcgtagcccttgatgtcaaagtagggtgattgtttttcggggcgttcttttggctatttttcttcccacggtagtttgatatgagttgcaaacaatcgctagccttgccaatggcatttgttacagtcatcctcaaaacagtagcattagatagcggggcggtgaagtcgatccttgcttatatttgtccaatgacgagaacaggttgtaaaataagcatataaacgcagatcaaggctgtactacaaatcgtgatacaacagtaacacaccaaccaggaacagacagcatggaaatatctccatgcaatgccccatcataatctacaaccaagaccaccccaaaagtaggcaaaaggacattcaattcgatccaatcagattttgtatcaaaaaagaaaatcccccgccacgccagtcctacaagcccgcccccaataaagaagacgatcagcccccaacagcaacaaacccttttgcaaacataaacccgggcctgccatccatctcgacaaattatgcgtgttggaaatccatcatatccccactcggaaccgtggagaaaaagcatgacgacccattggaagattaagaaaaaaagaaaaagataggcacgacccaaagcaagacccggatcaagattttgataattgaaattttttgtttgcaattgcactcaagagtagttccacgatccactagcgctctcaagttcatggtcaaggcatgttgttcgaaattcggttgtgggcgtcacatcatgaaaagggtttcggaaaaattaatcatcagaaacccttgaaccaccccaacacagacacacttcggttgccagatgacatcgcgagctgaactgggacttttgggaatggccggacggagggtgcgaatactgagggtccgcttagaccttcagggtcgacttacgccagtgtcggcgcttggcgttgtatctattgtagcattgtatcagccatgtgttcgattcggtatttctgtatttattttcccctccatttctgggttcgtgcggtcggcgcgtgcgcggttatctgtatttccctctcgcgtgcaccgtgccggtatcactcttcccacaaatggcggtcgcggatatatagaaatggatttggatctcgagacgaagggtgcgatttacctgatggtgttgccggtgcgcagacggatccactgggggatggggcggttctgacgctgagctttggcaagcttttgcttggtgcggaaggtcttgttgctctgtgtggaaaattgacgttaaaattttgtttctcagtgttcagagttctgactggggagagaaagacggcgaagatggcgcatgtatttttcgagaatggcgggaacagggtggtaacataccggcatcttgaaggttgatcgcgacggcgagcttgttggatggacggatgaagttatcgaccttcgagtgtggatggtttgtgtgcggcagggcttggcttcgcttcggttgggtcaggtgatgtgggatttgtgcctgaggcggtgaggccctaaggcttcaaggcagaacacattaaacctggcacagtggtctaatgctgtttaggccgagtacctcttggcactccgtttttgaatacaacataattatataattatacaattagttaaatagtaagttatctaagctgtggtattcatgtccgagaacaaaagagcccgttatgatgatatggctagataataataacggctaaaatacggcaacctccagtttcattccttgcaaataagccctttagaaggttatcagtcaggggcctcattctcgtgcgtctagaacatttgctaaaatgcagccactattcaatccaatctccgatgtatgtgatacatactgcctaagtactctatactgacagtctcaccaacagccccgaagctatgatctggagagagacttcccgctagacggaacggaccttgactccgtcacagacgagactctagtgacccttcttggctctgttcctatgatgcatggcattcggtattgaaaggcggcggcagtgtcctaccatgcgaagcagagatgctcaaattcgttgcgatcaaaaccggcattcgagttccacgagtccatcgttcatttcaagttgaggatgagactcagtattttagcacgaagcgatatatcgtgatggattttatcgcaggccaatctctcgacaagtgttagaccgacccactcgataataaccaatgacaaatcgctatgcaagttgcggacatgatcaaagagatgcagtctattgaaatcttgcagccaggccctttcgcggccggttcttcacggattatagcgccggtccgtttaaggactgtgctgaactccaaggctggtttaaccacaaacttgagatctgtaagcactacaacaaatgtcctaaagatatcccgccattccaattcagcacctttgtccttacccatcaggatatcagtcctcgaaacctagttctagaccggaatggagaagtgtggttgattgattgggcgaatgccggtgcatatccccctgcctttgaaagcgctgcattgatggctcagcagtttttccccggcttcaataaaacagttttggctgttattccacgatttcctgaggaagaactgcaacttgattctattacatatgggttgattactgcggcattggcctaatgaggtcttacatgatacatgaatctgtgtctttatgctatgattttggcattgctccagttctttaacttgctgatggtcaatgatccgcggcttacgcggttcttagcttgcttataccgtagtaccacaaacaggacattgcaggatgcagcaggatacaaggtggcatagtacctcgagtgattataacgattcctttgactacataagataaagcactaaaaaagacaattcatagagcccgacctaatttaatggtatgggaccttctatggttcgttccattaccactgtctccctcctgttccattatcactctctccctccaaattaactccacgtagtggtccaaacactttctctataccttttctattatctcgttcctcggaatgagctcggatgtccctaccactgcccttactcccgtcattgtacctgaattagatccagcctcacttgcattggatttgaaaaaatcctatgaaggccaaattccactgccgacattaccaaagccaaaacagcagatgagatggaaacagtcggcaacggatccaattgacaacctcatggatacgccaaaaggttggaattccaatgaacccgatcttgatcctaagtacgtatttcccgttatatccatatatatacatactgatatatactatatattgatctggatgctcagattgaaaggtgccgtgagcggatcgaggacaacatcatgagccagttatttcaatgaaagctggaggacttgttacgagagcagaaacgtcgcaagtgagtatcccctgaaagcctttttcttaaccgggtttaagtaaattatcagtgcgatgacgaccttagagccggctggcttgagttggcctgtcgtccagcgcttggacacccttaaagggatccacgaacacattctcagcgagaatgaccagtacgaggtggttggtaatgtgacgaatataatagcagcatatcgattgggtcaattgagatggaatccaggccttggtacctaccagtctaagggcgttcaactctgccagccgaggcctttcagatgggacgaaattaatctcattgatgccaaacatcagggtcacaaaggcttttgggtcgaaggggtacgtcttttcaaacaccaaacttatcggaaactaacatagcttcaagggccagggccaacccaccaatgattcaagtttaagctgagccacttcctacaactggcctgttcagacaggttccaacaacgatatgcaaataatcgacgaggaatcggatagagcaatcatcatcgattttggatcttgccggaagctaggagagagtctagaaaacgtcggccgtacctacgaatggtacaatggtgaagtgtagaagtctcttcccgagaatgacttgaacgccttggaagaaattcacatttggcttggtgttagttctaaaggggttcactttgaatagtaggactgggcacgaattcgtattctgctctagtgataatatcaaccgccgaagcgatatactacaaatacacgtccatctagagtctagcactctttaccgaactaagagccgtacgggttcctgggaagggctcctccccccctttttcttcttttcttcttgtcttctctccatccctccgaccaccatcttcatgcaaccggtggaatctgttcttcaaaaacagagcaagaaaaggaaacaaaaatgcaaaggtacgcgtctgaaaggcatgctgaaccttcgaaccactcatcaagcacacgtgatgttgtatgacaaagatttaatcgttcaaggcagccatctctaacccaaagagtgcatttcaacctgaacattgaaaacaagagaagaaaaaccttggaataaaggaaggaacaagggtgcagggtttcatgtgtgctttccctgcaaatcttgcaaccccttgatcacccgatttgctcttctacaggaagggaaggaatgactaaacaggaaggatctttcagatcaacaatcatgtcgaatttccgcccagttcactttgtgcctgcaaaccgtcaagccgagatgctggctctgccagtactgaagatctttgccgtgcctcatcaacagcaagccggtacaaaccactggtgcttctatcttatgacatcctcagacacatccgttcagattgattgtcaaccaagctacactgagcctagttctgtccttcggggaggctccaaagccaacctcgtggtttcggaattatcatgtcttgttcccaacgatgctcaagagcgcttcgagcttgatatcacaccagggctcttagttgggcaagtttatgacctcatcatccagaatgcacgccacaagtacgaattcgacatggatggcgtcgggtgtaggtgctgggccaccggccagcttggtcttttccaccaagctcaaatcattaccaatgaatcccaagttgcggcgacaaaggctgcgatcttgaagttgtggcctgagcagacgccgctcccgcttgaccaaggagcctattacccatgattcaatatttgtgctcggtttcatatgctattcatggaagtgctattccatgacttatcccgatttcggtactacttttcttacaacaaatgaccggaaatagccaaaaggaagcggatggttacggaatactgagactgttatatatggaagagaaagaaatctaatgttttcgcagtcccggaaatattgcgctcgcaatttggtggctgcccaagcaccttgcttcagtactccgtaagcaggttcaaaccagccttaaccgccatatttacctcgtataatcgtcgacggctatcgtatagtagggtaattttaggtagaagcattggaattgtgtctgtttagcggaaagtagctttggggctgtgggtgagactgtcattatagagtgaatcaaatagggaagtaggaaacatccggacgaggaaggactcagacatgaatgagccaatcaacatgtctctcgcttgacgggcgaatcgttctgggcaccttgtcacatccctggagatttgttgagatcacaactttgaggtgcataatgtgtctgtgcgatgggcgcgttcaaaatacttcccatcaactcaagcgcttcgatttattaccaccacacttaaacagtcaataatacacttgtcagcctgaatcatgtcatcagttcctattcgaaattctgttacgaaaatttctgattccatttggcgccttggctgcacaatcgagtgcaatcgaactgcggaaccagatgacacatgcgcagcagcctggaaagacggagaagattggtatattcttcggcatacaacatctgagcaactacccgatgctacgtctgcaaattcaccggttcgtttgatccacgaagggggtactctatctgcagtgtgggctattggaaataatgccatctgcaaagtccaccctgggaccctaataccacttcagagagcgaaactatcaaattcgttcaagataaggcaccccaagtacctgtacccgaagtaatttactcctgggtagatggaaatcgatcattcttggtgttgaaaagagttccgggtatcacgctgagagacgcgtgggaaactatgtccgctaccgaacaagattctatcttggatgaggttgttcacatgtacgatatactcgcttctattacttcggaccggctcgaggatgtacatggaggtccagtgtccgagccttacctggctcactcgaaacgggattcattggagccgttgagtgtctgagtgtaagacatttcttccgagaggatcttcatccaaatccggagattgaagagcgattccatctctatcaccccgatcttgcgccaggaaatataattgtttccaatcagaagctattggcgatcatcaactgggagagcgctggattttacccacgtttctggatatcaaccaaaccttctatttcccggggaatgaactttcatccgccaattccaggtattgaggaaactgaatggagaaagcgactcagagtgaaactcgaagaacacggttaccctcgatttgcagattggttcatggaatggatgaggacaaaatctagataggatagtgatttaagcactttttggttaatccggggatagatctatatcttcaccctctatatccttgatagaaaccatggcctctcatgagatagcactgggaaaggcgcaaggtgtttatctcggtcaaacctcacctgggcaaggagacatgggcaacaatcaatggccttgtccggagtaggtaaaaggagtaaagttgcagtcaaagcgtcgggcatcgggcatggaaattagccgacgcataaaaaaaaagtggaaaaggtccagatcgggctcgttgcggatcaaaaattcggtcgaaataccccgtataatcccagttatgactcaggtgttcgtattcgttttcgcgtattgcgttttgcgtcatggtgatgtgtttcgtgtcaaagtcaaggcatagtacggagtatgtgtgtactatgcaactcatgcatgcgccaatcataccggacctgcgtcaagcatggagtaatgtagctcgtggctgtcaagtcgtgttccccggaaaagggcgcgttcaagggatgcccttgcacgaggaatgtgaagaaaggaatgacccgcctgacctgtaactactccgtaactagttagttacttggaagccgattagcaatagagtcccggagatagaggcagggtctgccaggtctaggcagcacttgaggttcgttgcataaaagacacgtcggagttcggactacccgacccgaagagaaaaaagcccaagccccctcataagtataatctcagaacaaacgcatttagagcctcccatcccttccttcacccctgttgttaatctttactcttaatacaattactcctacctttgacatcccttaatatctgtccctttgtacctagctccttgattcatcgcagaaccacacctcttcagaccatcctcaaccagttcttcatggagtagagatccaaaatcgaaagtttcaacatgcagcagcccgaggagggcgtgacggccgttgagaagatgggggactcgcagcttaacgagaagcccatcgacaagcgcgattcggataccgcttccgcatcaacaaaggagcacgaaagcacgaccccagtcgcgacagacgaagatgcgatctatgctcacttgcccgagcatgagaaggagatattgaagcgacagctagatgcaccgctcgtcaatatatcctacttcggtctatatcgctatgcatcccgcatcgacatactcatcattgttattagcacactctgcgctatcgccgccggtgctgccttgcctctcttcaccattctctttggctccttggctacggctttccaaaagattatgctccgcaccattgcctatgatgaattctaccaccagttgacccacaatgttttgtacttcgtctacctaggcatcggagagttcgtcactgtctacgtcagcactattggcttcatctacaccggagagcatgtcactcagaagattcgagagcactacctcgaagccattctgcgccagaacatcgcctacttcgacaagcttggtgcgggtgaagtgactacccgtatcacagccgacaccaacctcattcaggatggtgtctccgaaaaggtgggtttaaccctaactgccgtcgctaccttcgtgactgccttcgtggttgcatatatcaagtatgcccccttggctggcatttgtacttcaactatggtcgcgctggtcgtgattatgggtggaggctccagactgatcatcaagtacggcaagctttccttggaaagcgccggtgccggtggaactgtggcagaggaagtcatcagctcgatccgcaatgcgactgcattcggcactcaggacaagctcgcgaagcagtacgagtcccacttgcgtcacgcagagcgttggggcatgcgtctgcaaatgagcctcgccgtgatggtcggtattatgtttggacttatgttcatgaactacggcctcggattctggatgggatctcgattcctggtggatggtaaggttgacgtcggacatgtcttgactatcttgatggctattcttatcgggtctttctccctgggcaatgtcagcccgaacgcctcggcatttaccaacgctgtggcagccgctaccaagatctttgcgactatcgaccgtgtatccccgctagaccctacttctgatgaaggcatcatccttgaccacgtcgagggtcacatcgaattccgcaatgtgaaacacatctatccttctcgccccgaagttacagtgatgaatgatgtttcactcgctattcctgctggtaaaactaccgcgttggtcggtccttcgggctctggcaagagtactgtcgtcggtcttgtcgagcggttctatcttccagtcggcggccaagtgttcttggatggccacgacatccaaactctcaacctgcgatggctgcgtcagcagatctcgctggtcagccaggaacctgttctgtttggcacaaccatctatcaaaacattcgccacggtctgatcggaacacgcttcgagcatgagcctgaggagaaggtcaaggagctcgttgagaatgccgctaagatggccaacgcacacgacttcattattgctcttccggaaggttatgaaactaacgtcggccagcgtggattcttgctgtctggaggccagaagcaacgcattgccatcgctcgtgctatggtcagtgaccccaagattttgcttctagatgaagctacttcagcactggataccaagtccgagggtgtcgtccaggcagcgcttgatcgcgctgctgagggtcgcactaccattgtcattgcccatcgtctatccactatcaagtccgcgcacaatatcgttgtcttcgtcaacgggtcgattgttgagcaaggttcccacgcccagctgactgaccatgatggtccttacttcaaactggtcgaggcccagcgcatcaacgaggagaaggatgcagatgctttggacgcggatgaggatgagagtgaggatggcaagcacatggccaagtctcacatcgcacgcgtcaagtcagttgctagtggctcaaccattaggaaggatgaggccgaaacattccaggagacaatgcatcgccaggagtctcgcaagtccgtgtccagtgttattctctcgcagaggactgctgaaggcgccagcaagtattcacttttgactctgatcaagtttatcggctcgttcaacaaggaagagcggtggttcatggccatcggtcttttcttctcgattctcgccggttgtggacaacccacccaagctttcttgtatgccaaagccatcagctcactttccttacccgaaagccagtatgccaagctcagatcggatgccaacttctggtcactgatgttctttatcgtcggtattgttcaaatcatcaccttctcgtcccacggtatcgccttcgcctttagctccgagagattgattcgcaaggctcgcagcagcgccttccgagtcatgctccgacaggatatcaacttctttgatcgtgaggaaaatagcaccggcgccttgacctctttcctctcaactgaaaccaagcacttggccggtattagtggtcaaactcttggaacaattctcatgacttcgacaactctcatcgcttcaatcgttatcgcactttccttcggatggaagcttgccctcgtttgcatgtctgtcattcccattcttctcggctgcggcttctaccgcttctatatgcttgccgcgttccaggcacgttccaaggtagcctatgagggatcagccagctacgcctgcgaggctacatctgccattcgcactgtggcttcgcttacccgtgagaccgatgtctgggcattctaccacgctcaactcgataaccagggccgcaaaagcttaatctcggtattcaagtcatcgctcttgtacgcagcctctcaggccttggtcttcttttgtgtcgccctcggcttttggtacggtggaactctgctcggtcaccatgaatacgacgtgttccggttcttcgtctgcttcagtgaaatcttgttcggtgcccagtccgctggtacagtgttctccttctccccggacatgggcaaggccaagaacgccgccgctgaattcctcaagctgttcgagcgtcggcccaccattgacacatggtcagaagcgggcgagaatttggaccattgcgagggaactatcgagttcaaggatgttcacttccgctaccctactcgtcccgagcagcccgtgcttcgcggcttgaacctcaccgtcaagcctggccagtacattgccctggtcggacccagtggatgcggcaagagtaccactattgcccttctcgagcgattctacgatgccctttctggtggtgtctacgtggacgataagaatatcgccgacctcaatgtcaattcttaccgcagtcacctggcgttggtcagtcaggagcccactctctaccagggtagcatcaaggagaatatcctgctcggtagcgccaacgcagatcccaccgatgaggagctagtccaagtctgcaaggatgccaacatctacgagttcatcatgtctctccccgatggctttaacaccattgtcggtaacaagggaggcatgttgtccggtggccaaaagcagcgcgtcgctatcgcccgtgctctccttcgcaaccccaagatcttgcttctggacgaagccacctcggccctcgactctgagtctgagaagatcgtccaggctgctctggacgctgccgctcgcggtcgtaccactattgccgttgctcaccgtctcagtacaattcaaaaggccgacattatctatgtgttcgaccaaggcaagattgttgagagcggcacccacaccgagctcctgcgcaacaagggtcgctacttcgagctggtcaatctccagtctcttggcagggccgcctaattcctttggatttgctttttaatatatgtacacatacccccttcttcctttcttaattttatctcacatctccctttctcaatcttcttcattcttgttatagatcatttgttgtcaccagcgaacacccggaaaccagggtacactgtctcctctcgataaagagaaaaaaatcaaaaaacgtccattagtgatgtaggattagatgaatgaatacaatgaatctcaattcaacgccgcccggtttcttcgaactccttccactcagtaaaaataactccttcaaaccgtttcaagtccgttccatcagtaaatctctcgcattctactacttcaatcctcctccgaaaccccgaactctctctccacctcaacctgcctcacccccctcgcatcagcaataagccccatcaacccctgtccaacatccttgatatcattgtactcatgcaagagcttggtataccgctcgcacgtggtattaggatcgttactggaataagcagtggttagagatggaagatgcaatgtttccatgttcttttagggccgtgtcctccatagctgcatgcaattgggagagctggggagtgtttacataagctgcgtggtcattgtagttagatcggcttctaaaaccgcatgcttagcttctaggcttgcaatcgaagcgcgaagggcgacctgcgttgaatgttagtgtttgatatgatagacacgggtggcggcaaggtggggatactaagaacgtacgattctttgctggtctttgtaggacttgggttccttggctgaatccatggagattgtttgcaattaggtgcatatgcatatgtgttgtgatacgtcagacgcaggagatgagagcattgtaagaggagggagttatccatgtcctccgtaccccagaattatatactcctgaccaatcacggccatgctgaataatccagttcaaggcttccaaggtttgtgcgtgcgcatccttaattttgctatgagtttttgttatttgttaagtgttaaatgatagaatagctatatcactttgactcgagagttcctgagaacaaaaagacattgttcctttgcctccacgcgtcgtttccgccttaatcggatgccccggattgggtttaactgttatccgcatctgttctcttctcccttgcaactccctctgaccacaccatggcatatctccgtcagtccttatggactttatttgtattagtggcctcggctctcgcccatggcggccacgaggctgttcctgagggcgaatctatctcccaggatcctatcgtacgtcctactacgccattcccctcggcaaaagttaacacatgattccaggatgcaacactatggactcatatgattctcatgggtttggcatttggcctaatcttcccaacgggaatggttctcggagtatgtaccgcttcactgacctctccgtttccttcctaccgtcacgtcacgtcccatctctaacaaaagaaaatagatcatccgttcccgctggcacgtccccgtccaagtcgtcggcaccgtcatcgccgtactagcttacttcctcggccacgcccacaaaggccgccaattcgacaagaacctgcacgcctccgtcgcaaactggctgatgctattgctggtcgcgcaagttgtcctcggagtatatctcaaactgcacctggagaaggcgggccaggcccgcatccgatggatcttcgtgctggcccacggcatcgtcggcaaggccatgcccgtcctcagctgggcgcaaatgctcttcggtggcattgccgcgctcggcttctgccgcgatgaccatctcggccagtgtctggcccatttcattatgggctccgccttcatcgcgtacggtatctgtttgaccatcctcttgctggtcggccagtattggttgcgccggaccggccgcagccaggaattcttcgattccctcatcatcgccgcttggggctgtgtcaatacttttaccgaacaccgctggggttccgcttgggtgcacaatgacctccagcatactactatgggcattatctggtggtgtgctggtctgctgggtatgtggctcagccgtactcgcagcggacgtcctaagcgtaacctcattccggctattgtcatcttgattaccggatatgctatgtcggcgcatccccagcagctgatgatcagtaccatggtccacactatcttcgggtacaccctgatggcggcgggtctgacgcgcattattgagatctcgttcattctgagggataagcctgctctctccgagccgaacagcttccaatacctaactcctttcgtatgtatactctccggttgatgtggtatataggatgatactgactcttttctctttcagttgctatatgcctctggcttcctctttatgggcgccaccgaggagcagatgctcctgctaaacaacgcaggcgtcacccacgtggcgtacgtgttggtcctctacagcattgccttcatcctcttcctctgtaagttgattccctgctttcttcttctagaacaatcactcatccttcccttcagtcgtcaacatcctgctccacctctacgctgtccacgcctggcccaactccgagtccaccaatcaggacggccccatgtactccactctcaacgggaacgcgaatgtgaatggccgtgcacgctcaaactcgcagcagatccaagatgccgaggcattcgagctccatggtttgatttccgatgatgatgagggcccttccatgggaccgcggaagaatagcgatgaggaacttggaaaagaagaggcccatcgctgaggccgtatattgattcgctggttcccttggcaagtatatcgtgcattttgtgatattgtgacggcgtctaggttgggttgggttcggatagcattgcaggtcctaaaaggccttgaatttgagtagctaatattatatctgaacaaaattgtacattattctcaattccatgaagcatcaatggttgctcgtgttctatcgtacataatgatacccggatctaagctcggaaaaaaaaaagaagattcgtaatatggtaaagagtcctcccagtccagtcccgcttattccaattgccttcagtgatccacggtaatcctacctggcggcacagcagccatatccagcgcaccaacatcagggaagaaaggatgaagtgaataaatcggaccaacgctcttttccccgtcaaacagcaacatattctgcagcggctgctccctcgccgagagaacattaataacatcctgcgccagcgcaccgcccaaaaacgccgctacgggactcagctcgctgcccaggttctgcaggaacgtccgcaggaacaccgagtccagtgtgagtggatccagcttcaattcctggtgtcggtctcgcgatagcttcgtgaatagttccaggtcttcatgggtgaaggttgggcggtggccgcgtagcttttcgaattcccacaatgcgcgcaggcagctgagcagtggggtgacttgcttgcggcgccttgcaagtcgggtgtattcttccgggagtggggaggtgtttgcgagaattagtggtgagtacacctcgcgcttggtgacgagctcgatgatcttgcttggttctttcttgttggcgttgttctcttcttttttcgtggttatgtcgatgatgctgcgggtgggtgtttcttgggttgcgggcgccatgttagatttgctgcgctcgatcacgaagtcgtggctgattaggtcggcgaagacgtagccgtagaagccgtgtagaccggcggcgtagaagggtctattggctagtcggcaggcggcgttcacggtaatgttggtgacgaagtcgagctctgtggcaattgtgatatcgaattgtgcgaaaaattcgggtgctttggtgctaacatcggatgtgtcaatgttgagcttgactcgagggttcattttgtggatttgcggtcctgcgacttgcgcgcgctggagtgggttgtcagcggatgcggtagggactttgctctgttgtagctcacgttctttccaatcacatcctgctcactttgcgctgcggcgataaaaaactgcgcgcccaggtcctcctctgtgacgtcctggtggtcgagtatggtgagtgatccgatgcctgccaagacgaggttcttggccacttcatttgcgagagctttcacagtgataaggaggatgttcgccgagcggattctagccgttgttaggacatgtagtgctttgcaagctggattgctcacttttcctgcgcgtgcactccccacagccggatctgtcggtcgtacagtgcgatttcatctggcaaagtcagtaaggattgaagcagattctagttattttccataccagcactgatggcctgtgtattatcttgttgctccgccatagtgtcgatcgagtacaatcttgcccaggtacgagcttggcgatttaaagcctcgcagttgtgtttcggggatctgctatcaagtgagaagcactggttcgatgacttaatgaggggcgcaatgagaatggaagttgtaaggttgcagatggaagttcagaagttcaatgatttcaaatagtccaagaggtaaagaagttccgataggtttaaatgtcaggtgacccgggagctactgtgtggggccgtggggacaaagaagtatacaacctcatgcggacgaggatatctgtttcaatatattcactgaatattgatagaatatgctagttagatggggatcacggacatattctcagaaaaatctcaacataggatgaattaaacaaacagttcaagtgtctgattttatgatatcattgtcttaggctagttataaatagaggctatatcaagtcaacaaatagaaatttgcataacacacgactcaatcagcaaataatacgaagatattcacaagtatgctctagctttatcgacaatgtcctctacaatactgtagagcttttctgcagaacttcccttcctcgtgttctcatatcagttttgagcatatgagttctaagtaacataatgatagttaggttgagaggtaccatcttctcaccaatgagatttggctttaagtattatctaaaaggatattgaccaacattccggaggccactttgtctttgatcctttatcatgggaaagtataaggtcaaagagctaagtgacacaattaactatcaccccatgccggatgaaggtgtctacacggagaaagaaagcacggagtgagaactgcaagattaatgaaatccaaaatccaaaatccataaatacaatgaagttatctctcaacctcccaccttcactccactatcgatgatataatcgaccatcacgtgttaccaaccttgtgaactcacaagaccaactcttctccgaaacactttattttaccagtacgttaatctttttgggtttctttgatttctgttgggttagttctaagacgctatctcctaccccatatccccaacccaggtaattccacctcaagcggtactaacgagcctgaacgatggtatgtctctcatggctatgcgtccgactgatgtctcacaccttcctttagtcagggaattacgattaccctcgtgcttcttcctcttcaacccgccgctcccgcatatcccgtcattctaggcctgacgagcgccctgacatcctccgtctccagcatctccgcaatctcgtatcggaacgaactcgctccggttcttacaacgcctacaacaccaactttgccttggaaacattaaatcgagaaatcgctgcgcattctctggaccgatctcgcgatcgtaccaaccttgagcaagctcgggccgacgtcgatcgccaactgcactccgagacaactggccccgcagagccaactcggagcatttggctcgaccagattcgttcagaacgggctcgaacttcgctctccccggagtcacattcccttcgccatcgtttgccctggcaaacgttccgaccgccaagcccggacggatctttatccaggtcaccgtctttcatgccaccatccggccagtcgggccgtgatggccaaggacggatgaagcgtcggaagctggacaccgatgataaccgcgaggaatttcgaggcttcaactatggtcaatatgggcaagtactaccgggaatgctgcaaatggaaatcgctagctgcgacggaggaagctacgatccggatagcgggtgttcgcgccccgagaacgttttggacaacaatacaagcgtgtactctaccagagaagcccgctgcaatttagtcctctgtcaccggggcgaggccccgttctgcttgaagaagatcgttatcagagcccctcaatgcgggttcgacgctccgtatgtctgccaggcgtgtctgtacgttggactcatgactaatgaaatgaaacagaatacaagaaggtatggtattcgtcgcgatgacctctgatgaactgcttgcccgcaccgcccaataccaaattcaatactctagcggccgataccgccgtcgagcccgccgcagtggcatgcaaccatcccaggaatacctcactgggttccggccaccacttcaaaatatcgaacgcacagttctcatgagcccacattcagccgctgttccgcataccgcagaagacccgcaagcgcagttccgcatcaccaccgagtatgacaataacgaagattctggagatgacgaagaaagttctgcatttctggagagaacccaagccgaccagatggaagatcctttatcgtctactgatgagagtccaagcgatgaggatgactcttcaagacaccagagtcgccgacaggttcaatcggaacgtttgagtgccctcagccgtgtttctgagcagagactacgccatagcccgagtcttgtgcatccacaccccctagccgagcctgctcatccaactgccgaagttttgaagcctcatgcgcgcttcttcatcgagcgagagaagagcatggttaccattaaatttgacccacccccgtatgtgtcattatcattggatgtggataaccgaattttaacgtttccaggtctggccggttcattctcatcaagctgtggagcccgcgagcccacgggaatattgacatagaaagcatcatcgcacatggatatgcaggtccgcggttcttccccagtctcgcttctcgttaacggtgggaacaaagagttttgatgcattttggatcagagggatagaagcaattatttctcttttggtgcatagtttttcagcccagactgtcttactaggtcaactagtaagacaacttatcatgattatgatatgactttcaggattattctttattctgccctgatttgttccatcgtgcaattcatcgagatcacactaaatacatttcgtatgtgggatcaaaaggtatgaccacttgatcagcctttaattagcatctccaataccacatttccaaggaatctttcttgatatatttcttgatagatgaataggctatcttctcttctcggccaccacagcgtaataggtagtagcatgtcgtttccaattttccatcaggctccccttcgatcaaggagaagttggcgccaattaagtacctatataggcccactggttgccctggaagatatactcggcttgcaccagcatcagcgcctggctttggaatgatgcgagaggagtctattggagggactggtttttcgtttgaataaacatggttgaggtaggaagatggtgagagttcactgcgagtgtactttggagtgtggggggctagatacgggacatagccctaattatttcaatgtaaatacctacggagtacaattccctgcatgctatcttaagatgatacatgccctccgaggtcctcgacacatatgttgtacataagtatctcttcatcaccggctacgacgtccgccacagcgacgacagcgagtgtaagacccctcaaccccactagcctagaccatatcgttgcatgctgtaccgccgtattaaatgcaacttgccatttgaagaaaggcttggtgacagcaatttggtgggggtcaagccacattatgttatctcttgacagggctagattcttatcgatgacagtgatcgacgccaaggtggttagtggggacgggggtccccggtgttccctcggctatgcgcattggtagcttgcagcttgatctaagtcaaattgcacctgtatacaactgttggaaggataattcaagtcgatattctccgtcacctcaaaagaacccgactagacatgtagaaatcttgcggcggattcgaaaaacagacaccggccgttcataggcgtatttgggatatcagcattattaggaaatatgcatcattgtgcatggtgaagatacgtgctggctgaatttcaggatcacgtaggttggccacatggagccgatccgtgtctcttcattcttatatcctgcgtggcgcggttagctagagactaaaagccaacctataagaatagattgtcaaaacgccctaaaaaaccctgaactggcgccatgcctgagccacaaacgttggaagtaagggagccaatctgaaatatgagcactaatgcacggctctagaaatggttatctcaaaaacggtcacctacgtgatagtcggaaaattcttgaatcggttgttccaaatgcatttgagcgcctgaccagcgccttcatgttgttatatgtgttcacatctgtttgtgttggcattgcaacatgtatactccgtacccgtgcgggaactgagttgtacttgacagcctcaaagcatggctaaatcccctgcatgtgttgactagtgcggggtggacaagttatcaaaattgcgacatcctcaaatagcttggggtctggttcggggctggtctggcagtggtaggacgacggaagtggtggacacgaaccaatgtacttttagaatagtagctggtccagccccggggctctcggacagtggaggtctccggtggccccgctatagtaaattgtcaaagtacggatgaagccattgccgctggcaaccaatgccggggtattgtgggatatcggacatggccgcggagtcaggaaaacaaggcaacttcaaggcgtcacttctctatccaacgatttcccgtggccctccccctggcgatgacgccaatagacccggtccgccgttagcctgtttggccaggcaattagtggaggagctaaacggctcagcgcggggctcattacgcatatgcaataggtgggaggagatcatggatgtatgggaccatgttagctgcagcgctagagtcgaaataaaagtctatcctatttctgatttgaaaggcgagagaaatagagtggatgtaagggagaggaggaggagaagaggaagctctttaaagagtcaggtgtccccttcccgctttcttagtctttccttctcccggtctctttctacttcttggcttcttccatctctctacttttttttcttctataatttatctgctttataccccttcctagcagacgtccttgctaccgataccatgcgtatcaccgtcaacgtcatccgccccgagcaggcggactcggacatcatcaacctagaagtgggcggcgatatgtcagtcgagctcctcaaagctattgtcgaaagcgaaactaccatcccacccgaagcgcagcagctcgtctacaacaaccagctcctccagaacccttctcaaaccctagaccaagccggcatcaccgagggcgacatgctcggtgtgcacgtcaccctccgagctccccagccctccactcgccccgccgcttccagctccgtcgcgcccagacagaacactcaaccccgccccggcatgccggaccccgaaacgattcgcctacacattctgggtgatccccgcgtgcgcgaggccgtgcgcaggcagaacccggagctgtctgaggccgcggataatgctcagcgcttccgcgaggtcctgcttaggcagcaacagggcgaggcgcagcgggaggcggagaaggaagctcgcattgcgatgctcaatgccgatccttttaatcacgataaccagaaggaaattgaggaaattattcgccagaatgctgttacggaaaatctacacaatgccatggagcatcatcctgagtgtacgctctacgtctttgaactgccggctaggctgctcaactgagaataaagctaaccaatatgtttctctagccttcggtcgcgtgacaatgctctacattcccgtggaagtaaacggccaccgtctaaacgccttcgtcgactccggtgctcaggtgaccatcatgtctcccgagtgtgcaacatcgtgtaacataatgcgcctggtagaccgtcgctatggcggcattgcgaagggcgtcgggactgccccgatcctgggccgggttcactccgcccagatcaagatcggcgagatgttcctgccctgctccttcaccgtcatggaaggcaagcagatcgacttgctcctggggctggacatgctccgccgccaccaggcctgcattgatctccagcggggtgctctcgttatccaagaccaagccgtccccttcctcggggagggcgatattcccaagcacttgactgaagagttcgaggccgaacctacggtcaagggagccgatggtgccgaagtgggtgcccgcactggcgcggtcacgcacaaagcggagaacaatcccaatgccaatgcgacttccaatgcatccgggtctgggtccggcgcgtcagggtcacagccccgaatcaatatccggcctgcgcctgcttcgcggtggccgcaggattccgttgccaggatcaccgagctgggattctcgcgcgaggaagccgtccgggctcttgatatggcacatggagacttggaaggggcgatcgggtttttgatttgatctatggatggattccgctttctgcatttacactcgaaggcgttttggtcgggatgggaacttgtattagcgagatttgatcaaagcacgtaatgatgtgtacgattataacgctggctgcattataatagattttgtttattgtcctacatgtaatgtaagtgtgtgctgttcattcccgcttggttttgggcattagtttgtcgcgtagacggaataccatgtctagagccatgaatccgcctatgaggtgttagtaacagctggtgagctaattgcgacattcttgcagacacccttggactgcacatacctaacgccatatagggagcatacagcatggtaagctgctgcttctccgcgaccgagcggtcagtccaactccacaccaccaccagagatgtcaatgtagtgatgaaggcctggataccgaacacgaggaggtgtacagggacgagggggtggtctagatgaattggaaattgagttagttgctgattgcgtttgccattgtcgtgtcgttcgtgttcggggagaggatattccagatattgcatttgatatagatatgtaatggatataagacgtgatggggtggactggatgataccatatacaatgtacaaatagtagcatgtagcgtgtaccaacacgagcttagaaaagaaatggaaatacctttaagcaaaccccggaccgcccatatcgagagcgggaggtggtacagcagctccatccagatgaagacggtgaaccatgttggggggtcttcaaagaatttgtcgcggtaggttgttatgtagaactggcgcaggtggtgggagaggtttgtttggagaaaagctgggaggagggggactgtgtcgattactgtattttggcgttagtgtgcatatacgaggtatgaagatatgaagatagagatagagatagagaatcatacggaggataatggggacatgggtgacgaaaaagagaagataggacaagtcccgtttacgggtgcagatggacatgatgtgctgggtcatatgcaatgcgaaaggataagacggtgctggtgctgtgtgtgttgtatacggagtatgctgtgtgtgtatgttgtgtgtggtcgaagtgtagatgtttaggggaaggggatatcaggtgacccgaggaacaatctggaagagatggaagttatagaactagaacatcgtataattgcttttttcgggggaatgctagtgtgagatcttaatttctagcgtatttcaccgagataaccaaagtcccaagtcgatatacacatccaactccttcgagtaccttgatctccatctcaccgctgcttctcaattttaaggtggcctgactggtctcctcggggagctgttgaatccgagctaccctatatccacaagggaatacactgaagtagacaaaggaccttgatgtcaaccatcaagcctggaattacatcatcgggataaggtaggcatgcagtgatgctacagggaatctccttgataacctgcctcgagagagacatcccgggaagtagaccgcaagatcgggatgccctaattagttgatgacagggttctttagggttttcctcgtttcttcccttttcttcccgtttctcctttctccttggagcttcctaaatagctcggaacagttgtaaatagtccttctaaccatatgccgaatcataatccccgcatgcatagatcatggcagataatgcaattgccattcggcctgcagcatgccttatcttcgaggtcttcatcatctaccgtagcggtgtaagaccatggaagctttggaacgaaatgaaaaaaaagcgggcgaacggtagtggaatggggatttgcatggcagtggataagtggagagacgcgtttattgcttttcttgctttattgtttttatttttatcgaaattttacttttcttcctggagagatcatttttctgacttctttttttccattatctctgaccgctgttcgcatctttccactcggagatgaagggaagcgttggagatgcgtatacagaactatatataaaatataaaaagaacctcaatcccacttccatctcttctccttatccatcttatccatctattcctttactccaccctatacagatcgatatacaatctatacaatgccttccacagccccccgccgtcccaagcagcccaagaagcaagagcccatcagctacgacatcaacatcccctatgtcgacgtagacaagcaatccaagatcacaaccaaatacccccaatacctcccctcctgggacccaatctggttcgacccactccagcccttcgaatatgaagacccagccctccgcgtgcgcaacaaatcaaaacccaacctgctgcccgcaaccgccaaagtctcgcacatccagcccagcctaggcacaatcatcgagaacgtccagctctccgagctctccgccgccggacgggacgagctcgccctgctcatctccgagcgcaaggtcgtcgccttcccagaccaggacctgatcgatgcgggcccagatgcccaggaatccttcatgcgccacttcggcaaaccaaactaccagcccgtgtccggctccatgaccgaccatcccgccttccacatcatccaccgcgacggcaacagagacgagatcacccgcttcctgcagcagcgcactacaaccaccctctggcaccaggacgtcagctacgagatccagccgccggcctatgtcatgcttggcctcctgcagggccccgaggtcggcggtgataccgtcttcgcggctacggacctagcctacaggcggctttcgccggctgtcacggctttcctggatggcttgaaggttacgcattcgtcggcgaagatgattggccatgcgcgcctgacgggtgggttggtcaggaaggatcctgttgatactgtccacccgcttatccgggtgcatcccgtgaccggggagaagtgtatgtttttgaatggggagtttattacgcggattgatgggctcaaggataccgagaccaagtgggtgttggatttccttatgaatcacctcgttgccggtcatgatttccaggttcgcgtgcgctggcaaccgaggactattgtgatgtttgataatcgctcgactattcgtgagttatttccacccccttttccctcccctggggaatgggaattggaattgagctttactaatgagatcttagactctgctattgtggactacttggatgatgataacggtgccaaggctcgtcatatcttccgcttggctgctatgggcgagaaacctattcctgtctatgaggatgaggaggacgaggagttcgaatgatcgtaatgtgatagaatggggttcggtgtttcgggattgattatagatttaatctggttggaatttgatttaacttgctttcatttgccttcatttacattcaaagattgaaatattcaaatatccattgcaatgatgatcagggctatactccctgtatccattttgactgtgaattcgttttcattaccaccccacgcctagagttacaagcagaaatcccagaaaaagcaccgatccttaaaagatcctatgtcaagtaaatctcaggagtcaccgccacgcagatctgcaacgctacatggccagtccccccacatcgccgcggcagcaaacgccacattaccgtagaatatcatcgatccgtgaccgcaagtcatgagcgatctccaattgttccccactaatgacaccgctctgttgcaggatcagcagcatctcagagacacgttcggcaacgatatccgagccgaagaccatgccgcccaggcgcacggtctcatggaaccatccactcagcaggtacagcaggtcgtgcgcgatgaatcgccggtttgacccgtggaagggcgcctcgtcggtgtagtacatcgtctccagcaccgcatacagcgattcgtgtgcaacgccaagatctaagaacagatccaccacccaggtagccgggcccacgttgcgttgaaactctaatgcataccgctccagcatggggacgagctcgcggatggggaaaatggtctcggacatgcgaagccgactgccgaggctgcggactttgtcgatcaccgcttcgtaaggttgcggtgagccgcgttgaacagtggcgtcatggatcccctggatcaggtgttgccaagttgacttgacgtcggccgcattgcgatggtcggcttggtagaagatttgaaggcagatatcatggtaactggcggaatcggcgtatttgttgaacagctaaaacatgttagtatcttgttggaacttattccgaaaaaattagaacttactgtgctaatatccatcactggcccatcgacctcgcgcaggatctcgggtttccgttcgggaagaatccgctcgtcatccttgagtctttgaagcaggtcatcctgaagattggccacgtcgatgagattcgaaatctcttgcagcagtcgctgtcttgactgacgcccgacgtccggtgtgaaaatcgaagcgttggcgcgggcttgaccgaggtactcaatacgacgactcaggggcaacacgaaagcactattggccaggtggaattgaacctgtgcagtctcgaagaaccgttgggattgggaatagaaccgccagagtagatcagcatggcctagatcatcattcgacttgcgctggaggtaggtgacgacaaatggagattgcgtctgcagcaaccgatcgctccagccctgctcgaggtaccagtcatacaaactcgtcaggaacacctcatcggtagaatcagaaatcacgccataggcttcgttctggcgtttggcaatagtggtcagctggccatcaatgagaccgggatcggatgcagccaatttgtcaactgcaagcacgactttgaaaatgagatcgtagcactgcttgcggaaatagaagtattccttgcgggggtcctgggtagttgtgagcgggagctgataccgggatccatagggaataagggggataagcacctgttcgggacgctgatccatgatccaggaatacgcaaggtttgacttgtcggaccgagcagcaacgttgagggcgagctggatagcacctaaagagaaaaggaataaccaatcagtatgagaagcaaaggccaggatcacacaacatacctgcaaagaactggttgaaaatgaaattgtccactgccgaaaccagataatccattggtaagtattccgccacctgctggaagagatgcagactctcattgagcaagttgcggcccaattcagtattggcaccggcctcagtcgcacgcttcagcatttcttgtgccttgaaaatcaccacatcctcagtactgcagaaactgccacagcgtcgtcgaagtgcatcagccacagtctcgacgttggagcccttggcaatgttgcggttaacaatgcccttcacgagttctttagcaatgtcatgtcccttgctggagctgaagagttcctcaaaggtgaggctgaggaacttcgctttcgattcagctggcaaagtcgccacaatctcatcaacccgctcatcaaatagaacaagtatgaatgagataccttcgattgtgtgtgataccaattgaacgagagagtgtaatgcgcggtgctcggcttgcagcgccacttcttcttgcttgctgtttacccgggcaagagcgtcggggccgttgaggccatcaataaaggtcttgttcaccttgaagaactctgccagtgaggagagatcatgctggacagtctgcagtttgctggaactcacagacgcggaaacggattgtgcgccattaggtccattgcccactttggcaatcctctccttccagatagatcgcaacagacgcgcaatgtatagtgcaatacccgtgtgtcgaggagagggttgcacggcatcaagagcagacattgagccatccgcaatagcattttcattcagatgggcccgaccaccttgagtaatgaaggcctggcgtgctgccgccaggatgtccggatcggtaattcgagtcagtctttggtcaggggaaatctccataccctggccacaagccaccgccagggcagttgccagcatctcgctccgtccatatgttctcaggaaagtttggatatcgccggtcagtccctcatggggattgccgccggtgcggagcaaggccgcgaagatatccacgagacgacgccgacgaatgatgtgaactccaccattagtcaagattgcaatctcggcagctgggtggtcgaattgaacggcaagctcgttggtcactggtgaaggtgccgaaaccagaccaatatcctctgccttgcctcccaggtctagaatgatagccgactcagcggctttaccactgaccgagccttcctggtactgagcgatacgaccagagtcaggggttgagatgaaaagagtatcaatcttttgctgtggatccttggtagtaaaacagaagaaatagccgggggaatatcgctcggcgagacgagtgggtgaaagtgtggtaatctgaccagcagaaggtaaaaccgcgccaagaggcgaaacgagtgagatggaagatgccaccccgctcacgccgggggagagatcgacgggaggtgtcttgacatgcagtgcctgcatgcttgtcggagggctggtgttggtcgacgcaggcgcccaactgtttgagccagtggcgctgagataaatgcgatatcctgttgctgtcgttgcaactagatgataccgcgacgcttctgtggctggcaccggactgatcgaaacaatcttgattctggggttcagggtttcgttggaggtgatgatgtgccctatgttagagtagatatccagagcgcgtttggtgattgcgagtgtcaaagcgccctcgggtcccatgtggaatactcgaattgtagatgcagaggagagtgtgtagagcagcttccgagtgtcatcgagtgccatctgcactacatgctcggaagcgctttgtgcaaggtttgtcaggctcattgaaggcctgaaagccgatagacgcgagctggtatggttgactctgccacagcggccctggaaccacctttcctcttgttggtaagtgacctcgtgcacatcggtgtcagacgatcctccaaagaaaatgcgtccagtggatgctgacgccgcgaaaacatttatatccaagccgcggactgccaccgacattcccgtgtgatacagagaaacctgtcgacctccgctgggcgtattctcatagcccattcccagcagaatgatctccgcagttgtcgcaatgaccagcaaatgggtgatcgcaggcaagaaaactcccgggcgcggtttggtcaacttaacagcattaatgctgttaggctgttcctcgaatcccaccaattgcgggttagagtgtgtgaaatcccaaatgtataatgcattgtcaatcgcgacccacgcgtgatttaactcggcaaacagacccatactggtcgaaacttgtgcgcggttgtattgatcgaaaatctggtcggggatatcgtacattttgactttttggaatggtgcccatgattgggatacggggatgttgtactcagacgaggagccctctgtttttttttgtcagtcttgcttcaagcagtcttcaatggggatatttacgagataaatagctgtcaaggtctggataacgcgattcgctttgcaagctgctattaatcgttcgcgccccgcgttcctcggtgctcaatgtttgatttttggacttcgaagctgctggagggagctttggcatgggcgtttggggttgcgtctgcaatggtgacctagtcggtaaaggccgtgctgtgactggtgccggggtctgaaagtaagctccaggaaggggtttctgcggcgtcgctggagggagatttgttggaagagtcggatacgacatggcgacggttttaaggagggagaaagggacgatcccccgctagaaaacacaagaagctgcagtgtaggtcggacgagaaaaagaaagcaaaagatatgtgggggaatgacgatgagagaaggtcttgggaggagattggattattcaaggtctttgcgaaaagagagagtcaacacctgggagcgcacagaccaattgggatcttccgccttcacggtattgattgtcgattgtttcccattcccaattgatccctcaattgaacttgtttcctattgtcttattgtctaacgttttcaatcaaaatgttccaatccatccgtttttcttcgcgcctaccagctcgtctggtccggtggaattccaccggtccggtcctgccacccttgatggctactttgcggactgatctgaaaactgccatgagagccaaagatacgacaaggtagaggtccttttcacttctgttttcgaggttcagtaagcttataattagactgaatgtactccgcgctttgatctccgagaccaacaacgccgccaaaacctcctcgccgattcagacagacattcagctcttgtcgctaatccggaaacgcatgaatgcctccaaagatgcggcaaaggagtttgatgccgctgaacgtccagatctgaaggagaaagaggatgcacaggttttggtattggaagaatacgctagtcaggttcagaccctccccatcgccgatatcaaggtagtggtcatcgaccagatcgctgctatggtcaatgccaatacgaagcccaatccaggcaccgttctcaaagctctgtttgctgcgggaggccctctggatggcaagccagtagaccggaaagaagttgctactgaggtgaagaacgcgctctcttgagcttacatttaccagattgtatattagtgtcacaatagcctcagtcaagggcattaaaatctcattcataatacaaagaactcctctccaacgccagcctgaaatccttatgaacagaagaaagctactcctccaagagaagtcatcagaacacccaaccaccaccatcggtctggattgatcagctgttctctagcgatcagctgaaatcctgcctttgacgagagttctcgcttttgcttttgcttatgcccggttggtatgggattcaatgtcgtggtagggagcatctttggtggctggtaggcgaggaacatgggatggacaagtgagccgtccatcctggtcaaatcgaggcgtttaatgcgattgaacttgtcgatgtccacggagaattcctgtcttatgtcagataagccgtctaagagaacacgaaagaaatgtacctgaaactcctcggtgatgttatatcgtgtgtactggcctgcctgcttccggcagggattggacagtagctgacgaccatcgacagcaattggtgtcaatatcagcgttccgttgccgaacacagtataagcaccatgttgccattgcatgactccccccgggcatgatgggtcagccgctgttcgatattaatacagcgtccaaagtctagatccatggagaactgacggtttgagattgcgcgatagtatgcggattcgtaatttccttcatcatcgaatgagtatgaaatgcctgttagattcggctcgatcagtttgtcgttgagtggatcgtagaatccctatgcgcgttagtctcgagtcattcatatagtgtacatagttccacatactggaccagtaagaacatcacgagatttggtagtccacgttccaaacaaatcacctgcactcgccaaagcggctgtgactagaagactccaaatcaaaaacatcttagttgacagagggaaaatcgacagaaagggagtatttgaagggcgccctttattggggtggagatcaacaacatagttcagcaaggccctggaatgggaagggtttgatgatcgaagatgtacaaggatcatttgtctctattaacaatcataaaacatacaatggctctatagtgtagtacatatagttatcactgtagttttgagatgattccatcctattggaagtacccgcttgacgctttttccggtttatttttgtaatttacttcctcgtttacccgtggacttgataatccgtcgacaactatcccaccagaatggcttttcaggttgcaaagcgcgaccttcgcaagaggatgcgctcaatcctgcagggtttgtctataagcacaatcattcaacaatgtcaggtcgaatggtggtccttgggttgtccataactaactttgtcccagcaagcgcagcaacaaccaatttcttgtcattgcccgagtaccaaagcgctaaaagcatcgccgtatacctgtctatgccaagcggggaactctcaacaaatgggatcgtaaaggatgctctacagcaagggaagaacgtctatatcccgtatattcatacccaggataaaaaatccatcatggacatgttcgcgctgaaatccatgtccgagttcgagtcattacagctggacaaatggggaatcccatctctcttgtctacgcagattgaaggtcgaccgaacggattgacacaaggcttggatcttattgtcatgccgggcatggcctttgaccacgggttccgacgacttggtcatggcaaagggtattatgatcattttttaacgcgatatgcaacaacgacccgcagtatgccattcctcggtaagtaaatcccagaaaaaaatccgtttatcccgactgaactccattgtagttgcccttgctcttcaagaccagttgctcgccgaggatattcctgtggtggagcatgattggttggtagatgcgatcgtggttggtgatggtcaattcttagaccgcagggtgtagcgcaaatcgaaacagaaaaggaaaggcgaaaattcaaacagcctggatcagagagacattgtctcccttgagaaggacttggcctgttgcgcattagctgtgttcacatagactttcaatttcatcgtacctagaggccggcgcttctcttcctctgtcttggtagccagacgcacttcaacggcatcgtcaataaccaggttcatgaattcatcaaagccctagcacaggttagctcaaataacaagcaaaacggtatcctgtaaagaaacacatacgcggatcttcccctcaatgcggaaagcgagttgctcatacagccagactgagacggtgctgcgtttctgcaggagactgaaaatgaaatggatcggagccaacaatgtcttgcggcctgccatgatgtgcggttatgtcgagagtgatagctgtcacgcgggagacgaggcgaagaaagctctggcgggcctggcaggcgtcccgtgatttgattacggtaatacggttatctggtcacggccaccccatcccaccatcaacttgctccccctcctcgaacgcgtttccgcactcagatgctgatactttcttaatatattgctgagccttgattaatctatttagttcaacatggccagcaaggaagccgggcaggcattcgccccggtcctggcggccgtcgcgacaatgcaaggaaatgtgtctaggactgagaagactcaggcccatgaattccttgagaaattccagaaatcggtacgattctttcgccgagacctaagtggtatcttttgttaatttcaatgcgtttttagattgaggcctggacaaccacacatgctctattacagtcccccgatgtgcctgtcgaggctaagctgttcgccgcaactacactgaaaggaaaagtaagggtattcctacctgaggagtttcgccgtttctaattgcgcagattattttcgatctcgatcaactccctccggactcagtattggccctgcgagactcggttctaaacctattggttgcatttgcgccgggcccgcgccctattcagacccagctatgtgtgtgcttggccagtctggcgattcagatggtcacatggcaggatgtgttggcgactgtcggagcagctctaggaaacaccgcaggggattgtgtgctggaattcctgaagatcttgcctgaggaagtcaccgagggtcgcaaaatcaatctcagtgtatgttcctctaatgcgtttacaaaagttcaagctgacatctacaaaaggaagacgagttgctcgcaagaaccaaggagctgctagaagacaacgcggagcaggtcatgcagctgatgatccaatacgctcagtcgtcgcgtacgtattcgacggccacgtcccattctcctgccgaattaaattccataactgaccatgaacagctgccgccgcaaccaacccccgtcttctcgactgcattacctcgtggctacgtgaaatcccggctgccaggatcgttgagtcacctctcatggacgtcatcttcaaagcgctggacaacgacgcatctttcgacgccggtgtggactgcgtttgcacgctttaccgcgacacaaaggacgtggacgagtcattgcccatcattcaagccctttatccacgattgatggcacttcgtcctaaagttgctgaaactgcggaggccgaagatttggaggctttcaagggtatcacaagaatgtttgcggaggcaggtgaagcatgggttgttcttgttgcacgtctgccgagtgacttccagggactcgttgagacgcttctcgaatgttgcgcacgggactgggagcgcgacgcagtgtctctaactttcattttctggtacgagctgaagcaatatattgctctcgacctgtacactgacgctcgagtcactttccaacccgtctttgcccgattggtggacatcatggtgaaaaacctcgagtttcccaccccggaagacggcgaaaccgaggacctgttctccggagaccgcgagcaggaggaaaaattccgtcagttccgccatgcaatgggcgatgtcctcaaggactgctgtgccgttgtgggtgtgaatgattgtcttgctaaaatctaccaactgatccagcaatgggttgccaagtatgcatcgcaatcaagcgacgaacatgttcctcattggcaggaattggaggcccctctgttcggtctccgcgcaatgggccgcatggtcgacccccaagagagcaccattcttgggcagttgattcctctgattgttcaaatccccaatcaggagaaagtgcggttccaggcgatcatggcgctggcacgctacactgaatggacagctgcccatcccgatacattggaggcccagctcaactatgtgatttccggtttccatcattcctctcaggaagttgtacaggcctctgctcttgccttcaagtttttgggaactgactgccagaagttgctcggtggtcatatcgcgcagcttcatgccttctacgagtcggttcttgacaagctgaagcccactagccaggaggaagtcactgagggtgttgccgcagtggtttcggtgcagccccaagagaagatctacgattcatacaagatgttctgcgacccaatcatggcccgaatcatgaaccttgccaataatgcgcagactgaagaaggacagcgagccgtcgcggatcatctacagctgatcactatctttgtgcaggtggtgactccgattcttgcaccgggagaagaaaaccctgcggtcaaatactgcggtgagattctacccatcatgaccacgattgtgatgaactttacgtcttctacgcctattctcgaacgtgtgtgccgatgctggagatacatgatcatctcttatcgcactgacatgatccctcttttgccgactctggcccagagtatcgcgaacggattccaggcctcgcgcgagggttgcttcctttgggctaccgatgcggtggtgcgcgaattctccgatggtgccgagtacgtcgaccaggctaccagcgatgccgttttccagttctatgagcagcaggcggttgctttcctgcgaatcttgaacgatctccccccacaaaatctgccagatgtgattgaagacttcttccgtctctcctctaacgccgttcgatactatcccaagaagtatatcacttcgtcccttgccgtccctatcttctccgctgcactcagtgctctcactcttcaacaactcgaccctctcatcgctacgctgcattattatcgggatctgttcagctttgcatttgataagcctatggtctcccagttcaccagcccggaaggtcagccttacgttaacccgcctgaggttcgcgaggctgtcaaggcgttgattatctcgcaaggccagcctttggctcagcgagtcttgacgggcatgatgttcacattcccgggtgactgcttcgctgatgcgtcgggagtactgatgacgatgttcgaactgctccctcaggaaaccggggcatggctgcagaccactttgcagatgctgccgagtggcactatgaagcacggcgaagccgagcgacttttgaacagtgtctctgacaaagtccagtcaggagagacccgcaaaatccgtgttctcctccaaggttggtcccctccccttccctccccttgttctttgttctctaatctaacctcatctagacttcaccaactcttaccgtcgccgcaatgtagccccacgcgagggccttggccgtctggaggccgcccgattccgattcagcggatgagaatgccactgtaaattcttattgagtgctgatctgcactaaaaaagagaaccctatggaagcatttgcacaaatcaggcgtcagttccttgctattgacgtgccacgtagtacgatacacgatgggatggcatgaactcggtgtgatgattaatgacctgctggtacatcggcctgaccagaaccttttctggctttgacattgccatatgttgtaccagctcgacctgtatctaggtattcaatagtcgcgactcatttctgcattgagatgcgttggcgcactttctgtgtgtgggcatttgatcatgatcatgagttatgaatctattgagcatcaatattcgattggcataatccgtatatatatcttaggcgtagagtagaagggatctacatgtatattcattctacatatcactactagtagtatatatttagagaagaatagactatattccttgcaatgctatatatacacaacctacaacacatacactccgactatctctcaccaataaagtcatatccacaccaccccaccgatatctccgcacttcccccggacaacccgtttgaactcccacttgcgcttcattctgtgactcatttctgctccctaaccattggtccttcctttggtgctcagacattcttttttgactccaccttccagtgatcatcgtgtcatggcatgaaatatggagaacgacggtcaaccctccaagagacggcgacgcagtcgcaaagttctctccgatcgtaagttcgaatgcacatttgaaggctgtgggaagagttattctcgcgccgaacacctgagtcgccatgctctcaatcatgccccgaaacaaatctatcgctgcgactttcccaactgttaccgatccttcgtgcgacaggacctctgcacgcgccatcgtgaacgtcacaccaccagcggttcccagctccagaaacgtgatagtttcgccgaaaatggcaccaaaacctcctcgccttcttcgcctgctatcaccgcgcccgaatacttcgttggctcggaggatcccaaacctccggtgacaacataccccctcaccaccggagtggatagcaatgagataccagtggaccaatattcggattttcaggcggtactgccccatactgaggatcttatcgaccttgactccatatcctacccgattttcggcggggaaacctataaccgatcaccattcgccatggcagacgattttgcggcatggctattcagcgagccactcgcgccgttgggctacgggatggtaccacttgctcagaatcagttctacatcaacgaggctgtatataacgacgacaacttttgctcagtgattccacaacatcccatgagcgtgacgagtattctggactcgggagcaccgccggctctcatatcagaaggaaagcgtcaggagttgctgcacttgatgtcaacacgattcaatgaatcggcgtatgcgtcaggcactaaacgcaaagatgcgctgatggacggggatttgaataacgaccgacatgccttgagcttacgcatgatgcagacgtacattggatcgtattggtttcacttccatgcacaactcccaatattgcaccagccgacattcagtgccgatcgtaccccgaacctattactactagcgatcatggcaattggcgcggcgacattggataagattcatggccagtctgctattgaagcagcggctgaattggcttgcttcattgcctggcatttgcgttgggaaatcttcatggatgcggactttcggccgccggcgaagctttgggtgttccagtccctgttactactggaagtttacgagaagctcttctctacacgcgcattacacgaacgcgcacatattcaccacgacacgacactcacgcttatgcgccgaggcagttcgctcatcggtagttcttcatttgctaccccagaaaccaaagaagaagacgagtcatggtcagcctggatcaaggccgaagcgactcggcgggtggcattcgccgcctttttgttagattcaacgcatgccataatgttcggtcactcggccaaaatggtggcccacgaactacggctgccattgccctgtgacgaggcgctgtgggctgcgacaagcgccgccgaggtcgctcgtgtacaatccagtctgcagtcgcacggtgtgcgaccaattatgttcctcgacggcctcaagcgcacactcaatggccagcccgtccggaccaactcgtttggacgaattattatcatgtcgggcttgctgagtgtctgctggcatctaaaccagcgagacctgcagattagctcgctcggtgtgggccagactctcggcggacgagataaatggcgctcagcactccttcgggcattcgataactggcgccgcgacttcgacgaagccctgggaccgtcgaccacatcggagtcgcgcaacgtgctgcacgggctggcccatatgggctcccatgtcgatatagccgatctgcagatcttcgcaggtgctggccggttgatgggccggtctatcacagcgcgtgactactttgctgcacgggaaaagaccgagaaatgggcgagaaaggcttcagcgcgggatgccacgttcttcgcgctcaaatacctatctgcctgtttcttagacccggctacacaccctggggagtatgctgcgcgcgatgactacgtgttaaaccggccgtgggtcatgtatttcgcagctctggtggtgtggacctacgggtttgcactggacggccccttgcgtccttcccctaccctcctgacgttagcggaccgagagcgcgacatgcaggaatttctgcatcgcgtgggagaaatccaggaacccaacgaattagaggccatgaccgggcgcaatgggtgtctcggcctgctaatgattctccgagactcctttgccaaaccgcgatgggagttactgggagaagcggcgcggctgctggacagctgcatcgcaaagctgcagtcgtagcatgtatgaatgtgtttatataccaagagatgacgtttctattattccatgatctggccagcaatagaagtatacaaccccctaaatacgcccccctgtagcggttgccctaacaaccaccgccgatcccacacctagttccccccctcgaccttcacctcccaatccgcatttttgtttccaatctccaatctccaatttcgcaaactatccaaccaaaatggtaagttcccaaattcctcactgttgatagacttcctattcaagcggtccaaccgcaaccccttcccgcccatgtaaccgctcgccccccggatttcctccccctcatcaacaactgtgtcaacaaggcattgccagctctctcttccatcttcatcatggctaataaaatcgatcaggcatccacaaactacaaggaagcgttctcgctgttcgatcgccgtggcactggccgtgtcgctggtgacctcctcggtgacctgctccgcgcttgcgggcagaatcctacgctggctgagattagcgacttggagaagtccgttggcggcgactgtatgtttttattctttgatttatgtattagttggacgcgatcgcgtctgactatgaaaaaggaattcctggctaactctctcgttcgctgcagttgatttcgactcgttcctgaaagtcctcaaccgccctggcggtttccgtgagcccggcgagccggaggagtactgtcgtggattccaggtctttgataaggatatgaccgggtttattggtgtcggacagttgcgatacagtatgttttctgtttttgtcccaggcaattcggtttggttggtcgaaaggatattgctgacattccacgcttgcagttctcacaaatcttggcgagaagatgtctgacgatgaagtcgatgagctgctcaaggctgttgacactagctcgggcgagattaactacacgggtatgtttcgctgcgcctagagtgggctatgtgctatattgcatctgctaactctctccagatcttgttcgtactatcctcgccaactaataccccgatatgattaacgttcgatatggaaatggctttgccttggtggattgaaattcggcgcgttggaaccttcgtcttgtatgtttttattatcaaatacactgtattatgctgctccggggtatcgccttccgtagcgcgtagcgcatagatatagatatagatctaatctacatctgcatctgctagattgatcgcacctctataaactccactcccatctaaacaacccactccctccactccctctccccaaccccctcaccccccaacttctccgtctccaccacagccccaggaagaagataaacagccggcggccgctcctcctccccctcctcctccccatcccgcgcccctcccctctccctctctcgatccccagtagacgcccaatgcaaccgatccaaataataccccacaacaaccttgcaccgcccacacctcaacagaatcctcttctcgatcccgtcttcgcgccggataatcgtcgcccgccggtccgggatcgtagtagccagcagaagcgtcgtgtggttagagacatgccttgctcttgtcttgcgcgatgacggttctgtttctgtggtcctggcttcttcttcgaggtcggcttctatatccgcatctgcgtctgcgtctgttgagctcttgcgctcgaggggcagaatcagcgctttgtcttttccttcgccgccgcgccgcggtagggtgcttatgttgcgggttgttgctagcaggaggtggttgcagaagcggcaatgttgggtttggattgggagacggtggtcggtcatttttggaattggttattgactcgcgcttttgaactgataggagtcgggaatttggagctgctgcgcggaggcagattgatctcttatgttggtgatgcagagctggggtcttggttagtcttttgcgcggggttcatgaggaaatatctttctgctggcttagtaggtacttaccggtgattggatacacttgtttaatccgagactctgtgttgtcttgtatgctgaagttctaaaatgagacgatctagaaaaagagctgttgagttgcggagaattgcagaatggcaaggcggtgcgcttatcggtatctacagctaaccttggaacttgttagctacgatatagacagttcaagtagaggagttattggcatgctgctcgttattcatgagcacaagatacgcattcggatagctctatataatttaataggtatagtttatagccgttcataagccccgatggctgtaaatgctacgcaccactttacgccagtcccaaatccttgtagaatgcatcggtccgaggcgcacggcctaagaactcggtcagagtcttcatctcatcctggctaccacccttctctagaacctggtagcggtagcgacggccagcagccttgttcatgggatcgtccttgaagacggtgtagaacatgtcggtggagtaaacttgggagctgcagagcgaaatcatcagtattcgaacattgaaaccaatcacacaaacttataacttacctcaggtatccgtagtatccagcgtcgtaacctccgatcaaatgtccaaaggtcgcctcgccgtggccccactcgtcgccagcgccctgtacttccggtccgtccatctgggtaatctcatggcggagacggttgtatgtcgcagacagaggaagagcctcaatgtcggcgtgggtcttgggctcgtggacggtcatgtcaaagatgccgaagtgcagctggcgcaggttgaatagggagtcgttgacgtgcttggtgcgaatcaggttggcaatgacatcgtccgggatgcgctctgacggctggctggtggcagcttcgccctgagcctccttccagctagcaaggtactctggggagagggtggagtagtgtcggctcagagagcgcagctgcgagggttcccagcaccagttctccagcatctggctgggtgcctcgacaaagtcgcgcactgtgctggtaccgtggaagcgggagtagatggttcgggacaccaggtcgtggatgccgtggccgagttcgtggaagagggtcacgacctcgtcgtgcttcagcagactaggcttcttgggctggggcttggtgaagttgcacaccaatgcggtggcagggaatcggcgggtaccatccttattaatgaagcccggctgcaggttgaagttggctgcatggccatatttgccctcgcgagggaacaggtccaggtacaggtatccaacgaacccactgcccgcgtcctcatcgttccacacactgaatacttggacatcctcgtgccagacaatgtcattgccctggccagtgggggcaatggctgcccggtcctcaccaatgatctcaacaaactccagaccgaacagctcttcgaaaatcttcagcataccttgaatggttgtctgcaaggggaaccactcagcaataagctggtggtctagcgagtagtccttttctagcatgagacggtcatagaatcggtggtcccacaggtagtagcggccatcagcattggggtccgtggcgttcttcaaatccagcaacttctgtatctccttcttcccgccagcggtcagtctgtcccgaagatcacccaaaaacttgttaacggtctctggggtcttggccatcttgtcctcgatacgaaaggcagcgtggttgggatagccgatcagacgagccgcctcatcacggagtataatggattcccggaatagcggcacattctggttgcacttgttctcattggcgatcatgacttgccggcgagtctcggggtcgctggcatatttcatggtggggaagaggtcggggtacttgaacgacagccagagcttgccggcgttctcgtcctcgcccttcttcaggccgtccagaaggtccttgggcacaccagccagctgctccggggtaaaccaaatgccgccgttctcctcgttcaggttcttctggaattcaatgctcagctggctcagccgcttcttgatctccttgaagcggagccgatgagggccatcgggcaggccgagtccattacggatgaagtccttgtgttccttctccaatagacggcgtgactccggatcgagaatctcgttgcggcgcagtacggcatcgaccaaattgaagacatcctcacgcatgaccgcctcaataaagaactcatccatcagctcttcggccttggaagaagcatctcgcagcttcgagtctgttgatacagcctggtagaagcccaggatgtgtgactctagtcccatctggttgtcatcttgggcgagaggaaggacaaccttggcaaaggttgcggcctcgggcttgacctccgccaccaccttgtcctgaatggctcgcgagctcttgatcaagcgctcggcatcagctagaagtgactgcggggttgcggtaaagacaggcggggcctggggtggcttccggaggtgagcgggggccatgctggaggtcgtcaagagtcgtattggtacgttggtacgtaagtggcccagcgcgtatgagaagcgggcggggagacggaggaagggcgccacgatgaggatggcgaggatgacgatgaggagatgaaaacgagcggtgaaagcaatgatgggcgggtttgaatgcggtgggggaaggacacttggagatatgcagctgtcaggtgatctgaagctggtgattgcggggacagatatctacacttcttggcatttgtttctgcacgtccttgaattactctatatactaccaatagtttagttattgcatatggggtaaaacagtttatttgcaaagctaaataactagttaactaggtgatgtcataacttactaatgtataggttatttctaaccttggagctagaataagtagaaagttaaggaaaccacgtattctgccatgttacttctaaagtggaggatggggcttttgccaggtgtcaagacaatgtcgactaccccgtagatcagatatcccaacataataataataggcgtccggagtatcccgtacgcagaagtgacatgtgaaaagcaccgccccgcacttcgctcgctccaacctacagctcccctcagtttacaacataataaatatttcaagtcaaaatgatccaaatgaatatgttcatataggaatgaaaattcgtttctaattcatgattatctatgaagtgcgtcacaggtcgcttttgatgaacgaagaaagaaatggaaagaaaacgccaactccgaccaacccacaaatgcaaaaaaaattgtcatcaagttcagtttaagctgcatcggcagtggggattggctcaggcatcttagtgacctgttggccggcccggatgatccgctggcctgtctcgtcgcgcacatattcggagttctccttctgagcgcgcttccaaatctcaacctcaccgccgccacggatgactccgacacgcatggtggaaagcaagttgtgagcaccgttggagtggtagtaaacaccaccgttgaacatggctgtggcgtccttgccaaggccggacttgatcatcgccttgccaccggggtggtccttgatgaaatcggttacgtcgtgaacaactccggcaatagagatgaggccacggccgttcttggtctgctcgacatagtcctcccattccatgacgggaagctggtccaggggagtaccccagtcgagcttggcgcgcttctggtcgatcttcttctgcaactgctggacgcggcccttctcgatttcgttggagcggaactgcttcaagtcgtaggccaggccgagctgcttgcagatccaaatggtccacttggtggggtcgtactggtgccattcgatggcgttacggtagtcggaggggaactcgtggtggaagttgtggtagccctcgccgagggtgaccagggcggtgataatgtgatcacggggggagttgcggtcgtcgaagggctggtcgccgagccagtgggccagggagttgacgcagaaggtagcctgttgcacgaagaagatacgcagaataccggcgtacacgaatccgccataccagtcaccccagccgagaccagcgaccagcatggggacgatgagacccatggtgagcacgaccttgatgtagttgcggtgttgccagacaacgacggggtcttcgttcagatcggtgatatcagtgcggccaattcgcttggggttctgcttcatgaccatccatcccaggtgcgagtacagcaaacccttacgcacggagtaagggtccttgtcggtgtcggtgtaacggtggtgagcacggtggtcccgagcccaccaacggatggaaccttcgacggcaccgccgccgaccagagcgagccagatacgcaggggcaaggtggcggaataggagcagtgagcccagagacgatggtatcctgagaacggagtcagctcgagtcaaaggagtatacttctaattctgaactacttaccagctgtgattcccagtccagtgaagaagtaatagatgacagcccaaatagcagtcttcagctgcagaggcacgaagaacgcctggatgcagcccgtgaggggaacgccgatgatgaaagtaacgttgagccagttgacgtgcttgtaccagttctggcgagtcatctgggtatcagcaatgtgcaccttcttggtgtcagccgcccgagggcgtgaagcatccagcttggacgacatggttgatgtgtagaaggttggatttcaatccaggaggaccaaagggttttttatactagggcccacttgggaccaacgttggggagcctgggtcttgatcgccaacgtatgtgggaggaatagggctgaaagacgaatcaaatgaaagcaaatgtccagcgtcacgagatcccgaggcgaaaaggaacccgaaacagaaaagaattgccttgaaagcctacgctgggagacttttgcgcaaccctttgctcggatgtggcgtgcctcatcgctttctggcgaatgttgggtccagccagccccaacgctttggtgcctcaggcagtcatggccaatcagcgcgcgacggcaaatatgtttatgtcagcgctactcccagcagagtgggagccacgggtgaaggttaagtccaccaacggttatatttaacctcgggatttctaggaattatgctgctttcatccaatgacgtttcaccaagaggtaacattaataagacgccgcatggagctacatttctagttaacctacggttttcccccggtcgcctccttccctcaggcagagaattggcaatcgtcatacaataagtcatcgcacgttagagaatgtgtgagaatcgcgatgcgtacttgggcgaatcttattgaatgatcgaattctggtcatgtcttggccacccatcttctcgatgccgatcagatcaagttccgacgacgcgtatgcaggatgtgacagggaaatatataccacggtgaaaatcgaatgtagtgtgcaatcacaagctaaacaaaaatgcggatatagcgtgaaatcataagctaaacgaaaatgatgtcgtgttggtgtagaattggtatatcgtcatggacacccgttgagttaaacattgttgaaagagaagaagagtcgatgaaaccagccagtggcccgtggggatatacttttctggaacacgcgggatatccgagcctcctgccaaagtatacatactgggtaggtacctcgatgtactccggaggtatgaggtgcatgtatgaccacaggaacaaatcgagataatcacaacatctgatctcatatgatacatatcaccacatagtttcgaatatccctcggtatctcataacagtctgataagaacgaccaggaagccgacgtgaggtctgactcctaaggtcggagccttccacctcgtatactatggacggcaccctccgactgccagatcttagataaacgaagatagcagagaacgtttgatgatatccgggttgtggagagtaaggcctcgtgtcaggatacgtgtatcccgtacctggcaaactgccaatgtccctcctgaccaatgagatcccctcaactggccccattctccatctaaatacacagccgtgaccatcccgaaacacataatatgggggaactcgggccctttgggctaaccagaacaaccatgggccttcctgtatccttatctttccccactcggccctgattggctggcctcccaagataaagcaggggccctaacgcgatccagacaagcggccaccaggttatgcgatgctcttgctaattgtcccccaagtgcagtctctaattgcctggctgccggtgcgataacagaacctgtcaggttatcccttccactttggtggacggtggatcccatgtgttcttagtcagcgccccgaattttgaattttagagttaccgaagctcggggtgtataatttttttttttttggaaatttaaatataaaacctctgtcccggtgggatagttcaatatctacattcattatatcgaacattcactatggacggtccagatcaaatcggccccgatcattcgcccaagcgcacaatcagcgacagactgcgctacacggtcaagaccttcactactcggtatggcttcaaatgatgtgttctggaggggccttgactcacaatcaacagagagggcctactaggagagtacgactatggatacctcttcatcccacgactgccttttacaaagcgagctcgcaaatctgccccgttcttcggtctcgaagatcgcgtgccagtcgttctggcattgattctggggttgcagcatgcgcttgctatgctggctggtggtgagtcccagagacacctacaatatacaagcaaagactaagagcatcagttatttcaccacccattctgctcggcggctcagccggtgccaacttcggggatgaactctaccagtacctcgtttcgacttcgttgatcgtctcgggtctgttgagtgctgttcagatgttccggttccatatcaaggggacaaaatactatattggaaccggattgctatcagtcgtcggtaagagcttctcaattcttcagatcctcgcttctgatactaattgttcaaacaggtacatctttctctacaatcacagtcgctcaaggcgccttcgcccagatgtataaatcgggatactgtccttcatctccagatggatctccgctcccctgtccaaaaggttatggcgccctcctcggcacctcgtgtctctgctctctcctcgaaatcggcatgtccttcatgagcagcaagatcctcgcccgcgtcttccccccactcgtcaccggcccaactgtcctcctgatcggtgcctcgcttatcaagtccgccatgacggactgggccggtggcgcatcatgtggttcggacccctccgcccgcgcattgtgtcccagcgctagtgccccgcaccctctcccctggggaagccctcagttcatcggacttggattcctagtcttcgtgacgatcatcgtctgcgagcggtggggtcctcccattctcaagagttgctccgtcattgttggcctgttggttggctcgatcgtcgctgccgcatgcaactacttcgagtccgccggtatcgctgctgcaccagtggcttccttcgcttgggtccacacgttcccgctgtcggtgtacccgccgctcatcctgccgttactcgcgctatacatcgttatcatgatggagtctattggtgatatcacggcgacgtgcgatgtctcccgactgcaggtcgagggcgagaccttcgattcccggatccaaggtggtgtcctgggcaatggtatcacctgtctcttggccggtctgatgacgattagccctatgtctgtcttcgcgcagaacaacggtgtgatcgcgctgacgaaatgcgccaaccgcaccgccggctactgctgctgtctcttcctggttatcatgggaattttctccaagttcgccgctgcgctggttgcaatccccagtcccgtgctcggtggcatgaccgctttcctcttcagttccgtggcagtcagtggtctgcgcatcattggatctgtcgaacccacccgtcgcaatcgcttcatcctcacggctagtttctccattggaatgggtgtcaccctcctgccggcgtggttcacttacttcttcacctactccggtgacaatcatgcgctcgctggtctgatcaatgctgtcgatctggtcatggagaacggattcgctatctctgcgcttctcggcatcttcctcaacctcttcattcccgaggagcctgatgatgtccccgccatcttggagtcgaccgactccaatgagacccaggtacagaccaacatgcctgaacagtcgtcgacgactaccaaaatggcttgatcttgcgagccttgtatagttcagtcatataatgagtttgtggggccatcattgccctttttagcgttatttaatacctacaatgcaactttacgttgatatcccctgatattttcctaccctctccagtatctaccaataaaccctcaacctaaaaatcccaatatcaagacgaaacccgcgacttaaaaaccggcctcggctgcaaattagcactagccgtcaaactattctcattcccaaacccaaaacactccctctccaactccccgatatcgcagcgcacaaacccttcatcaacaagcacgcgcagcacagtaagtatccacactcgacacgtaatccccggaattgcattaagacacccatcataactcctcataatctcatcgacacgcgcatgcgtctccggcggaattctcgcgatctgaataaccacgcacaggaaattctcggcgaatatcgacgccgtcgcctcgtgcccgggaatccatccggcgccgatgccgcgcgcgtggtactttgttccgcctggtgtggtggctgtgcctttgtgcaggtagaaggcccagtggaagtcgttggggaggggtgggtcggagcgaatgtagaggattatgtggagggtgtttggggggagacccgctaggctttcggcttgtttttttttggtttcggtgggggtttgttttgtttcggggtgtgtttggtcgggcattttggagtggtatagatggattaggaattaggaattaatcaaatggaatggaatgagtaatttgaggatggtgaaatgggatggaggggatggctgccaaggattgagaatacagctggatggagggctgttgggctgattataactactactgataatggggggaaaggtagaagcgctgagtctgaagccctataactgtataggctgactcgtgacacagatgatgagagtctagagaagagagagagcctctagctacccgaactaggaccttcactgccagtaataagccttcgggccgtctttagtggaatagaatgtttgcgttcgagctgcaatgaagggacgctgggagtggtacaacgctggcaagtattaggattatataaactatactactattatggaatttttttacaccccctcgaccttctccccgggggccaacatcttaatataccggtgcaccccggtctcaagaacctcaacagaatccccaaccctaaccacaaactcctccttcgcaggaacaagctgcatccctaaacacgcattggtccgatcgccatcatcaatccgccgatacgactttagcgtccgatccggctcagcattatgtctatccccggacagcggatcgacattaggcagtcgacaccggacagtccgacaagaagcgtggatctcggtaccgccaatagcaagccgcttccagtgatcttcctcaaaagcagacgggccttgaatgatgatgttcgcgcggaaacggcgaatgctcaatcgcgggattgcgtaggcacagcgtgctgctacatcccggtgactggagatgctgagcaggtggattggatacgcgtctgcgaaggctgtgcttggctggaagcctaggtcttctttgcgcggtgcgttacggaagatctgccgtgaatggggtgcactggcgcggaagagtgtcagggtcttttttgatgggtcggaccctagatatgcgtgtaatgatgctgggagcagtctgccgtagtcatgggctaggggcttgtctttccagatcttgactgggactagtgggaacttggagtccgcggggggaagtagcgggacttggaatgtccgttggcttttgaggaacttgagtgccatgccgagcttgatgggcagacccttccatcctgctggcggaattcggggatacgatatcaacatcacaccctgcgacttgacttctgacaggtctgcgttgtaatctggggcagacgggtcaggaacccagatctccggatggatcaaggctagacaattgaagcttgcatttcgcagggtacgaatggtccattcgtcattgatgtactctgcaaagacgaattgtctatcaaattcaagtccagttggtacgacgtttgagacttgcagctcgactgcgccacaggatttgagcgggtagctgaacaatgcctttacgcgccaggacggacggccgtgatcatcttgattgctaggtagaccctggctgtactttgagtcgaactcatcgtctaggttgctttggcctggcggaagtcctaggcggcgacatcccttgggattgattggcgctgtcagtgttttcaatgtcttcagagaaagaaaaagcacagatagaaagaatagaataaaccaattggggacgatatcatccccgagggaaatgtcaacattggacatgaggagtatgcaggactcgagatcgaaagggaaaaaagtcccgccctcggatctccgaaccgtcaacattccactgtcctacttatgatggcatctttaatgtcatttttagagattgaatacagcgttggagcttgaatttgtttccatattcttctactaaatcgggattcattggctttgctgccagtcatcctgatgcgcccatgagcatcaacatggaccttctcggtctagacggtctcgaagggttcgaagatacgcgtaagtaattccccaaagccttagaaaagcacaaacattaatccattcccagcgcccgtggtttcgatttcagcgtctcagtccctcaacgcgtcggccgctacccgcgacccgatcgcgacgggcctggcgcgtctggacgaggctctcaatgacctccccgaccagtccaaccaaggcggcatcctgcgtggacatgttacagaaatattcggacccccaggagccgggaagacctcgctggcgtgagtgcacttctacccacaccgccacagtctgatttaatccagtcacaggttgaatattgcatgtaatgcactacgtgacggcaaagtagtctggatcggtatgtgatcctgttagttcccagagtcagctgcgctgccctgctcacaccgtcagatacgggatgtcccttgcccagtctccggctggaggaaatgtccgtcaacctggatgactttgtctatttccgggcgcatacgctggctcatctaatagccctgcttgcacgtccaccaaaggggtttccaccgccggaaacaaaccttattgtcgtcgactctgtgtcgaatttatttccagcttacttctccagcgcccaagagctcaaggaccagcctaccgagggcaaattcagcgataaaacacacctgcaatggctgatcaatcgcaaatggaacattgctagcgagctcgccatgcatttggctagactcgcggcgaaaaatattgccgtgttggctattaatcaagtccgtacggagatcaagggtcaatctcacgcagttctgcagccgctcttgtcgggcagcgcgtgggaggctagcgtacagactcgcattgcggtctatcgtgacctgccggatgagcgatttgcagaagttgagaagcgcgcgggtaagccattgcccgagcaagccgggctgctcgttgcgtttcgcattgaaccggtatgttgtgtcgatctccggcccactgcatgcgattgtgcttataatctgtctaggatggtctttatgaaacagagggaaaggaatctccgccctccgagcctctgacccctttgccaaagccctcttccgactttgagtactatgatcctcctaccccgactccttcgcctatatcctctgtgctgtcttctgcgccgtcctccgcggaattggagtctccaagcccttcaccatctaagctggcgtcgccagaacagcctgtacataccccaattaagaaacggaagctggaggaggtagccgatagtcaggatgaagactccgaggaagagaatgtcccatggacagacgagacaaccctgaacacgaattaaacatgaaatgattaattatttcgcgcaattactcgcttatcagcgccataagatgctatagaaaatagtacgatgtctctcatttctttgttggatatctctttcaatgtctatttttggtatgttcttatagactatatcttttttttccacatgcaaggatgaaaatatccacaaaatagtcaaatctctttgaatcgcaaatgttttttaattaaactaatatcggacttcgcccccaaggccgatgccggacgactattgaatgttgatctatccccttcccttgcccccgttaccccagattttgggtgcgaacttgtaccttaccaagtactctatgggcacccctgaacacccttgcatgcccaaggcttctttttgtttgtttccccttcactcgttcagacaagtccaaaacctgatctcctgcatgacagagcacattgtacgaccagtccatatcccactctgtatccgctctttcgccaattcgcctttttcttccttccttttacaaaaaacttttcaattccctgtttgtccacgagaacatgtggacacagcagacagggtgaaccagactccctcttcgagtccggtcgctcatatacctccccaagccccgaatgagtctcttctagaatcatgtccgacgttcccctggacatgctgaacgggatatccggtgcgctcgcgaaagaaggcgacgtacgacagatgatcctcgtcgccttcatcggactatcatgctacaacgtcgccgagctaattgtcctcgtgccagccacattccgccggtggcgcgggctctatttctgggccctgctcgtctcaggcgtgctcggcgtggtaccatactcggtcggcttcctgatgaagttctttactcacacggactccgtgctgtcggttactgtcctgactatcggctggtggacgatggtgacgggccaatccgtggtgctgtactcacggctgcaccttgtgctacgagacgagcgcgtgctgcgccgtgtattgcagctcatcgtcgcgaatatctttctcctgcacgtgcccacgacgatcctcacttacggcgcgaatatagtgcacagcggcgacgacgcctggatcaacgggtacaatatcatggagaagatccagctgaccgggttcacgatccaagagagtctgctgtcaacgctgtatgtgattgagacggtcaagctgctgcgccttggcgcggatgtgtcctcgcgcccggatgcacggagcatcatgtaccagctgatcgggatcaactgcgcgatcatagcgatggatttggtgcttttgagtcttgaatatgccgatctgtacgccgcgcaaatcaccgtaaagggtttcatttactcgctcaaactcaagcttgagtttgctgtgcttggtcgtctggtggatctcattcaggggtctagacatcctatctccatcgctattgccgatacgttgcctctttgctcgatgcagaggccgcccgagacgcctgatcgcggcgacgatgtgctttacgagcaggctgagccgaaggactttttggctccgccggtcggaggccgagttgttcagaggaggatgtttgtggagtctggaaggacggctttattagcaatatgacggtataaatataacaataatgaaatcgaaccgagctagaactggatattgtgtgtgtagtcctagagcataagccgtataaggagatgattgtgaggaatggaaataaattagaaatcaggggggtggctcggaccatctcctagcgcttcaaagcgtcctggtttgctatcaaggtacggagtaaagagacatgaagtagaccattaggtaggtaactgtctgtaggtggcatgcgatttgtaataggaaccgtcaatcaccaccagacaaaaggaaacgtttcattcgaggctacataaattatatgctctcgttcatagattggtcaggtagtcctcgatctgctccttggtcaacttgcggaaccgtggtccctgagcaccctccactcccttgaagcccagaaggtggtccgctggggggccgacaatgcctggaacgatgttagtcgatattcaccacaccttggctagctaagcagccagaaggaaagcaaaggaaaggcagaaacccaaactcaccaatttctattgtgtcaccattcatctcaccctcgatcgtctccttgagtgtcaacaacgcgatatggatggcatcttccaattctagcccttcagtgtaccgtttctcgaggaacgtcttggcgctcgttgcgtgtttgccgatggctgtcgccttccacgggtagtagctgccactggggtcgacctggtacagactgggcccacccttctgaataccgccagtcttgctggagatcttctcctcggggtcatccttcttagcctcttctgactccggctcaacgccctcgtcccagcctgcgaccagcagactgacaccgtacggtcgcacaccaccggattgcgtagcttcctgcactacccgagcgacgtcttgaaccaatatacgagtaggtgggtattcgttgtagatgcgcttgtagcctgtgtgcgagaccttgcgggccttgtcgaccagcacccggtagtcagggcccatgccggcgtagaccataccgatatccggcgtgatcagtgagatcttggatagcgagggaggatcgatcagaggcgaggatgacttcttctcagtcgcgaggacaatgccgttcgtagctatcacggcggtcagcttggtccatataggtgagcttggacgttttcgtacctttgataccaagggcagttacaccctggttgaccgcgttcaaggcatattctatatagatcagtcatcgatgcttaagctcagagacgatggtccataccaatttgcaccagctttccgctgtaatggagctgagttagcacgctgtcaattaaacaggacaagtcgtccttacctgggggagaatgtcgtcaaggagaatgagtatcggtcagccatgattcgctgttaataggaagagaagaggagaggatggaaagatcaaaagaaggggagctgtgttgtaggcagagatgggtgacgtttggcgcggtagagctcatgaaggcggtgaccagatcgggattagccgtggggtttgggacaccttcggcttttctgcttttcctcttcttctagcctttctttttttttcaacatctcaaaaatgaaacagtagctcggccttctcttgtcaaggttcgggtaaatttcgatgtgagaccaatggaagacacacagcattaccccccgcgggtctgtcgcatctgcctagaaagcgtgctgccgactttcgaaccctcagaattcctccagaagcctcgagtggtttatcaatcttccgatccagaatctggccgtctgctaagcccttgccaatgcaaaggctcctcgcgttatgtccacgagggctgcttgcagtcatggcgccatgccgaccccaaatatgggacaagaaacttctggcaatgtcccacttgcggctttcagtatcgtctggagcgtctgacttgggctcggtggatcagtagcaccactgcccagctaattctcacacttggcattcttttgttaaccgtattcctgcttggattcatagctgaccccatcattgatttctacttgggccccgtggatgtttacgccgaattggccgaggaagatgcctcctggttaggacacttcctcaaaggacttgcctctttgggcctattatcattcctcaaggcgatatttgcgctgtcaccttttccttggaatctccggtctgtcgcatcagggcgcaattcgggccgtaaccgggtcgcccagttgaactggatagtggtcatagttggcattggcactttcctttgggtatgtgtggtcacattgactatatacgacttagctaacgcagacaggctgtctacaaaggtgttcgttcatggagtagacgaacgctagagaaggctggcgaacgagtcatggatgtcccactaccaggtgacgagagtgacacggacgtcccaataccggacgctggaatgaaggaagaatagttcaatgaactcgcactacttaagttgccgtactcctctgccccatgagacgtcgattagtcaatgtgcgaagaacaataactgccttcattaactcttgattgtctgcctgagaagtagatggttggctcgagagcgtcttgttctcaagtcattcgctgcttcactcatcaggcagctttcttggggaaggcagtccaccactcaattgtaaaagagcgtcctgaccattgagtctgatctattagcgcttttggattgagcagcggtaaattcatgtatagtcatattttctattgaatcttattgtcacatccattgtctattgtccattgtcacgcgtgtgccttatttagtaacttgaatgcattattatggcagtcagtcccatcttacaaacacctctcccatcccctcttccctcttctccccctcatctaacttaactctcatctcatcttcagaatggatctcacactagagtcccaagccgcgattctttcctctcaagtcgcgatgggcctcgaatcagagggatctggatctgctcctcatgcaaacaccgagactgcaaacacagagaccgaaccattccctgatgctgagccattccctgaatacaacgagtccgagtgtgagatgcttgcatcttccatcgcagccgacaagcgccatgaacaagcatggatccacgctctcggcagagccgcaaagcaagagatccgcaccctccatgtcgatcccaacattatcccgtatatcgaaggcgacccatctcaccgcagccaggtcatcctcgaacagctccgagaccttctcgctgacccgcgactgcgtcatgagatccgcgggcaatttattaccatcgtcaatgccacccttcagttcaacttcatcatctttcaccaaaccaaggagcttctgcctctcaaagaagttggagacgcagaacttcagctcgagaccgttctcaaccatgttgaatttatggatgagatgcttagagagcagctgaagtctgccgaacaggtttcttataccctcgagagcgtctcgctggagggtacgtcggactacgaacgactctgcaagatgtcgactgtgttcgctaagtaggtgccacggctcttgtttcttgtctaccctttgcttcggcagctctgatacgcagaacaggaccatgaaaaagccccgtctccttgaacgacaactgcttgctttgtacatggacatgtatgaggaatggatccgcactcctttcgtccgtctgcgtaaccgtcagatcctgactgaacagcaacctagccccacacgcgcaaagctttcgcgtcgtatcattattgtctgggagctgatgaccagatgtatcgaaagctacggtaccttgaacttgctgactcttgagatcaaagaacagtactttgctccggtgctgggttatctttgtgactcgccagacatatgggagcactgctgggatcaataccaggcactcgagaaggatcgtcagcaaaccgagcagaacagagccgctagccaagaggatatctgaacgatggatcaaagagccactggactgtggcatggggtatcttttccatatctacgattttacgatttgtcttcagttcaataccccagatgcaatgttgcacgcgacacagcgaatgcataacgaaatcaataggaacattccaaatcatctttcccataactaacctcaagctgtactatccttataagccccaagcttaaacagcttcttcgcattctcccttccaatcttcaaccgatccgtatccgacatctccgccgaatcaaaccactcacacgcatccccgaacgtctcaaacggataatcaatcgagaacaaaatccgatccgccccaacctccgccatacaaaagtgaagcgtagtcgtcgagaaatgaccagacgtcgtaatccacaaattctccgcaaaatactcccgaatcgtccgcttacacgtctccgcaagtcccagcatcttctttcgatcctcaaaccagtggttaatccgccacatatcaaacgggatatgctcccccaaatggccaagtataacctgcagcttggggttccgatcaaacaccccattcgtcaccatcccaaggacatgcagactgaccccgtgcgcgaacgacagcggaggcccaatcagccatttccgatcagcccagagcttgtcgtagatcgtgcctgtggggttgcgcgggtgcaggtacagcggcacgtcgagttcagtgcacgtcgcccagaacacgtcccatttctcgttgtcgtagaagatcatgtcgtcgccgtcgacgcccgcacgctgtgtgtcgttcactagggcccctaggaacccgtgctgtgttacgcagcgtcggagctcggcggctgcttcttgcgggtcgtgcatcgagagcgtgctggcagggttagctggatgtaccatatctatcatgcaagtattggtcttaattatggatttgaggaaacttacgcaaatgctgcaaactgatcagggtgcgctttcactttctcggcgatgtagtcgttgatctcaacggccagtgcttgcgcctcctttgcgtcccagatgtcctgcacgccaggtgctgtgtagctgaggatttgaagaccgacgccgtggcgctcggcaaagtcaagtcggattggtccgacgtcgttgatctctgctgtgtgcttgtctgtgtcggttgcgaacatgcccgcccaccattttgtcttttcgtggaatcgggggagcgcgaaggcttcttcgagggcgattttgccgagcatgttggtttttagtaagggagtaagggaataagtcagtaaggaagtagaaaggcttgaggatggagataatctgtatgattatcagctgttttatagtaaatgcggggaccccgcacttcggaagcgttcaggctttccatggttacgttggatcatcagccctgtcaatcggaatgcccatcggaatgtcaatcggatgtgaaacctgataagtacattgcgtatacaaggaaagcatccgacggcggttcggtgtcggggcggatgcgggtagcggttggcggcggagatggtcaaggacatattattgtttcctaatctaggtcatgtctactacgtaatatctctagccacagatcgcagcccaatcccatgagtaggtggatcgcgtttagactgaacgatttcaatcgcttcttcatcgatcaggcctttggcgaccaaatggctgacatattccatagtccattcttgacaccgcttgttggtggtctggaaagccaagtgtgtgagcttgattcagacgttaagatacttccatagaatatatgcccattcactcacatcgtcgacaggggccatgaagttctggttgatccccggagtggggatttgtgccgccgctagttcgatcttccctcggggggtggagtcgatggatggagctgcatctggggaatcaacgatgtcggacgaggcgacctggccgattggaaaggttcggtcgtgagggtcgagactggggttgtagtttcgtttgaattccaggacgtagcctgccatcggtgccccaaccgcgtggattttggttccccggtcgggattggtagctgacgggacaaatattgagaagtgggctctttggaagggtgtattgcgagcagagatgagataaatttttcttgtagccatttttcttgttggttgtagttgattgcagagggagatggatgtgagatggtgaagctatcatacacgagtcatgtggctaaccatcccaggtcagtaaaaaccagataaagaaccagtacataagagtaaccaaaaagacatatagctaagaccaatggtcgtatattgagaataaaagagagatgaagatacagtcacccgtacttccctgatgaatagagtgaggtacccaatgcttgacaaggataattatactcaatttgggtacatttatttcgattttcaattaagaagaactaatatttgttcagacgctaatctatacaacgtaggctcggagaaaggaaaccaaatgagaataacacatagcagcatacatgatgacaggatccaagattacttcgcaacaaacttgattccacattcctctttggggcgacaagttgcagaatcattccattcgggaagaggaagacgattgatccttttgccctgcccgtcaaccatggtaatatcaaaccgcatcatagcataaacgaccacaagtttcatactcaacgtcgcaagtcgctggcctttgcaagcatgctttcccgcaccccagccaataaatggtgtttccttttcaattccccgagacggatcccagcgagttgggtccgggtagtagttcgggttgagcgctgtatccgaaaatgggtaaataacgagagaccccgaggggataacgtatggcccgattgtaagatctgggccgtggttctttcgcactgctgtgtatggctgcgaggtgcgcagtgtttcgcgtatacagaggtcgagattgggtgtttgagattcccaggctgtgagtgggatttccgagagggcttgggcgagggtgttcccagagagagaggctgatgagggcgtgtgggtagatataaaggctctgatctcatcttgaacatttgaggaccaagttgggtccgaggagatttgcatgattaaccatgttactagaaggaataactatcagtgttgttatattcggtgtgaacatcaaacttgcctatcgttccggtggcacgagatccagctagggataatcctaatatgcactttgagagagtcagaaccctgatgaaattactcaaagaacggaaatatggaatacataccccaaagatttggattgtaccatctccatcatcaatcatctgctgtagcatatcatccctcttgattccgctctttttcctagtgttaatggcctcttggacaattctgtaaacttgaacagaagtaaagaacttgtagaacaaggctgggccaggtaaccaaggcaaccaagttgagtatgggttagtgatagagtcgatagtgtcgacaagtgacttgagacgagctgaaagcaccgggtcattggcgatatcaaatgaagcaattcgcatgaccagttgaaaggtgaccttagataaaaccagatgtctcagttttctctactaaagatataagttagatacacgcacctcgtgaagggaagagcagggatcgagaatatactcgctaccccacgcgtccattttacgctggcattcggacagaatcaatggaatcactgtattatcttagtcaatcttcaagctcgagaacggaatagactaacacttctgaagattatcacttcgttgaatcgaagccattcgtctgactacgccgccaacttgatggggatcaaattgagcagcgccctaatgcaagaatttagttgttatgagaccgaagcaatcaccggggtcttacactgcccatcatgattgagaatgtatcatgtaagccgagacccttctccttgaagaagatttttcggccttcattcccagatagaacaatggcggtatgtcggaacagactggtctgatagatagaagatgatgtagtcttgaagccatctttgatgaaatcaaacctcttctcaaagaacaactgggtgaccttccaaccaggcaattgcaagcgcggaagggaatggccactccggggcggagatgccactggcacgtgtagtaacttatacaacaaggcagaaagtagaagaatcaccgaggtcaagctacccaaatattgaagagtagacgagccattgcagaaagcaagtaccagtcgagtcaaagtgctctgcattgtgatgactagaaagaagttacagaattgagactggataagatagtccccagaaagtctttataccccggaatgataaggccgaagcgggggagctcaatgacgacaagtgtatacgccttcccaaagtggaataatccaatgatagcgagccaatgaccaaatctccattgctccttccctaaatgtcgaacttgccggttccagccagcgcgagtcaactgattcgcaccttccctgacctacagctcatgaactagcctattcaagtatatcttggactcgctgttggctgttggctatgttgtcagcattagcgccatgcataccaggatttagattaaagcggatcgctcaggcgggccgttgatgctaatcaggaggcttatacccccattttattttggtatgtcatcatttcctcagagtccggagttgaccgagttctgatgcctacatttcggggtctctaggttagctcaggcatccatggctttgcaaaccctactgatatagtcgacccatgtaatgattatggagaatgattataggcaatttcagagcccatttagcaccgagcatataagagcaaattagatattctttccattatagaaatcatgaggcttacaaggctgaatttgaatagtcgaggcgtgatgaggtgcgtggtccttgccttagccatctaggatcgatatgcgaaacctgcttttgtatgcatgcttcctgactccttcctaattaggcccttccacggtgaacctggggatcccaaggctgtgggaccaataaacgtctgatttcaatcccgaggtcatttcgtaccagagttcgagaatccattttatagaacaagatcttactattctgactatcatcctgtcgacccgtatgtctaactcatattttggcttggtgataatctataacttaagctcatttcttctcaactgacaatctacataggctgagatcaatatcaaattcacttcctatcaggttgcatttactgtagctacaatggcattatagaggccagaaccaacaatgactttgtggtatactccgattggctgtattctagtttgcatacaagcgcatccattctatgcctattccgcgctgttgggtgggtgcgccaccatgcacctggggtccagctgattgggttcggacgttgaccgaatataagataatctattatgccaatcctttatgcaaagctgccaactagagtagtagaggcgaccaataagaagaaatactaagaaaataaaattgaagaaaatcagcatttattctcatgattctcaacgaccaaatcacaggaagccgccgcctccatacaaactgcaagcaaaagcacctagactcgtggcatttctcgagaaattgcaattcggactaatccttctgtgagggggggttacattgggatatgacttccaagtctgttcattagaaataccaatatgtcagagtagttctatagttctatagtaaaacagaaacaaaacgatctaactaaggacattaccccttgaatccatctcttccaatgtagaccaaatgtcactccatacccttctgatcacgcattaaatcccacatcctgagccttgaccaattcctccctctcataaagaacttccggtcgaacatccctcctcaacaaataccgctgtacaaaaaccccaatttgtctcaacccatactgcgcatggagcctcgtcggcacagaaaagacctgatccaactcctcaagcgtcttccccttcgtctcaggcataaacaaaagcaccatccaccacccaaccaaacaccagcttgcatgccaagcaaaagccccctgtattgtaaatgcagcgcgcagcgacggccacgtcacggccagaatgaaattgcagaaccacatggtcgccgtgcctagcgccatgccgtacgaccgcatatatagcgggtatacttcggctgtgtatgtgaatggcacggggccctcgccgggggagtagactacgccgaaaaggtatgttcctgaagcgatgcaggcgagacgtgcgttgtggctgctctctgggatccagaagctgaagcctgtaaataaaaaggccatggacatgagtgggaaggtgagtagcaggagattgcgtcggccgaatgtgtcgatggtgtagattgctggtattgataggagccagttgattaggccctagcctaatgaggcggctagggtagctgcaggagaaaaattggcctagggcttattatgttaactatctgaagaggaaggaggattgatggattggactgacctcgagaaatatctcggaagaatagtatgagataacgttcacaccgcaaaactgttcaagttagtactttgcaattactgctgtatgttttgcgaagatccactcacctgctgcataaacataacaatctgagacgccaacatcgctcgccgatttcgcgggacttcaataagttccagcagcttgttacgcccaagcttcatcctatcctcagcctctagaagagtatgcatgtagtacaggtcacgagctgcctgaattttatgattccgcagcacacagatagacctataagcacggtgatactgcttctggcgcatataccaatgcggcgactcaggacaagcaaagacaaaacagcaaacgaccagagccgggaacatcgccgaggccatcatacagcgccaattcaagccgacgatgacggtcgagtcgacattgtagaagatgaggtccgacgcatagccaaccatgatcccaaacgccgtccacacatgccactgcatgaccaacgcaccacggatggacggtggtgctgtttcggccgcgtatatcggcacagttgctgacttggggccgatgccgaagcctagcatgaatcatgcgacgaacatcgcccaccatgttgagacgaacccctgccagagacaggtaatcgcagacaagcagcatgctatgaatattgtacctcggcgcccgaaccagtggttgaatgggactgttagccaggagctgatgaaggcgcagcagaggtatggtgctgaatttactagaccgacgagccaggcactccgagaggattcgtcgccgatgccgaattggtgtttgtagaatatctgggctccgttgacgaccgtctggtctgatattgtcaccagggtattcctcaggggcttggaacttctcgggctgaatatacttacccattccctggactgtagcggataaagaacacagtgcaatgacagcatacattttccatggctgtgaccagcgattcgtgagctcccggcgcagtactcccttctcctggtttgttagaccagtcacattggcatattgttctgggcactgtgccaacacagcacccaactcgaaagcgcggatatcggattcgtcgcccatctcgtggagctcggctaatgtgcgcccctgattccgcagttcggtatggctgaacccagccaacggattggagagtttggcattgagactgcgccgtgctcgctcggcatctgttccgaatggcgcttgtgggacgaccttctcggacagcatggtgtcaattttcttcttttctggcatctctattttgaagtctatggccaaaaggattgaggagacgatgtttggttttacggttgggaaggactgggttcctgggacaaagaaactcgaaagcaagcaaaacacatgactttagggctctttcctctcatgaatgaagtacatcaatgcaaatgcaggaagaattcaggtggatcttttaaagcacctgtcaaagaacgagacatgaggttcaaggtggactgaactaattgggtattcttgaaagtggctcattgcaaacaaaggatcatgatgtgctgtttacccatttcgggctgcgcctgcgcgagaaagtcgagtagaataaagtcaagtggaataaagtgaagaatgattcatagacttgatggagatgagtgggaagtactacgatgtcaatcagcacttccatctagggcacaatcttctcccatattgatgactaatcatgactagacctcggctctttccaaggtttctttcaacttggagatgttgaaaaagaacaatactacgaactgaataatggaagaaaacatatatgtttattaaaaaggtatcaatttcattataaattaggccagttgtgaaaatctgtgaaaatctgtaaatcatattagcaatgatctcatagactcgacaagagaagaaagtcaagaggctctgtcagataacatttatataacaatgtttatcaacaatatagttcagaacaggtctgtgtgaaaaggtcactcatcataagagcgaggagaaaaaataatataaaaagcacttaaaactcacattctgaaattttaactatcccgtccatgaaataattcatcatatcggagacagcttggcaatgtatgtccttggagaagcttggcaagctgaacaaagctacaagctatgagcttgccatgcacaaccacaaggccaatacggccgtttttgaagaaaaacggccatcaaaactaaaaaaaagacaagaaaggtatttgatgaagaggaaatgaagggaagaagaaaaaatgcgagcgccttaaatagtaaagtggattgcgagtttgcactgtttgcactctaaaaaaaaagtgggagctgcaatttgcccaagtcgatttctttagtttttgtgaaattattttggtgtactgtgtgggcagatgaatatttccgttattggaatcctttctcaaaaattatgaatgatatcgagagccccagactggaggagcaacagagtaagatcgtcctcagaaaataccccaaaaagtctcgactaatcgatatctacattatacagctcctaccaagtctccctttgcaaatgtccgtcccgatggtcgagccttcaactctcccaattggcgcatgaaggttgcaagcccaacaccatcgcgcaccaatgctagcccgagcccgagccccaaccctaaccccaatacctcccgcgcagccttcagccggcccggagcgcacgtcccccaagcgattaacgatgggcgccgcctatacgtcggcaacatgccatacacggccaagatggaggatgtggaggcgctgttcatagcggccgagttccctatgtatgcctgcaccacttgaaacctgctggcccagccgtgaatcgtcgtcaactgaacaacccccgaaaatagcgagcgcatagatattgccattgatccttttaccggccggaacccctcctactgctttgtcgacctacagagcaaggagcatgccgagcgcgccatgaccgagctcaatggccgcgatatgctgggtcgccctgtcaagatcaagcccggtgtcgccaagtctcaggagcgcattcagaacccgcctgagccattccgcattgatcgttggcgccagcaagagaaacctagctttgcgaaggtcaacagtgactccagcaaccgcgtgtacgtcggtggtctgccgcgcttgaccgaccacggggctgtgcagagcaacatcgagcttttcttccggggattcaaggtgtaagtttggatggcttgggtttctgctatcgtgtgatcagtactgatgcgctgtggtttgcagtgagaatattagcaaggtcttcgccccccaccccgctaagcggttcgatccgggcgagcactactatctgttcgttgatgtgggtactcccgagcaagcccagaaagctatggatacactgaatggtcagcaaggaccatggggtggtccgctgggcgtccagttcgctcgtggtcccaaggatgcctgatctaagtacaggggcttacctaaaaaaagtattattaataataggatgtgtcgcattgtatcgcccattaagcgccataagtctaatgccaccaagcctacgtaggtagacttggagagcaaaaccgtttcctcgtcgaattggctgtctcgctcactcatcagtctgcggccaattcttttcttctattcccaaaattctaagtaattagacccattggtccctccatgattatctccaacactgttccaacactgtccgactttactggccataatacatgactcgctcaaatagcatacaacttggtataatcacagagcagaccgccgctaacacccaaccggtagtggcccagaatccagcaccaaaaattgataacaaggatattccattggacgtcatgatacgcctcctactctagttgctcctcctgtatattagtgagggtggaacagactcctctaggaataaaaccacgtggtagaccgaggttcacgccgaattgttagcccgtagcggaagacatagggcttattactaccattagcgaaggagacatttatactgggtgctatctcgatgaagttcaaattcaagggatttgatgtcatatatagtataatgcaagtaaaagactcacagtctgtcatgttcaaagattctgacatttttgcacctattactccctcttcgtcgcagaccagaactgcgtaactgctcgtcacatcagcaaccgtcctcactcacaagaaattggcaggaactcaccataagtgaacttcagcaacgtctctggctgctcggcatatagactgtcgatgctcttccttgacgtatagtccacatcgaacccgagcagatctgccagctggagcacttcctcagcggagagctggagagcggtgtggctgccccattttagcgctgcgtacatacacgtcagcccgagttcggcggtgaacggatcacaagagatgcataaatgtcagtgttcaaggaagggaggacagtaacatacgcccaagattgatccacaccccaccaggctttagtagccgatgtatgttgcccaagaaatcaatcacgttcttggaaatgtcgatgaagaagagcgtgacgacggcatcgaactcaccgtcctcggggaacatctctaagaagtcgccctcgacgagcttgacggccttgtttggccagtggtccggcaccgttagggcggaatagcgcgaggaggggttggcctgatacgtccatttggtcacaaagggctgcagggtgtgctggtgcagcgaggtcgtatggttcgttagcaggcggtaggccaggatggagccgtagtccagctcattggccgtgacatcgtaccctgcaccgatgtgaggtcgcgccttccactcaaggaagtaaaatagacgcacctatatcagcgatatcgcttgccagcctgcccatgccgcttccgggtacaagtaccttattccctctcccgttcccgccaaaatgttgctcaagcccatccagaacaggcggaaatacggcctgcctctcctttacgccctgtgtgctccaatctcgcgaaagatgcccaaacgccaggtccacaactccaaactccgcgtcttcattgtcctccagtgctcgtgggccggtgtggtaatcctctctcgcaatctgcgcgatcttttccgagaaccgggcattcacttcgacccccttcctagctttctcgaagtgtgcaggatagccgagcttgttgcttatcgccttctgcgcgggtgtctgcttggaataccgcgcatgcttccgctggagcacttgctcggcgaggaacggatactgctcgaaggaattgatgcagtgcgccagtccattgggaagggaggagtatcttttcctgggtttggcaggctcggcggaagcttcgaaggctcctccggagattggtgctggaggggcggcaagcggggcggtgagcggggaggtgagctcgacgtgaagggcttcggcgcgctcggagagggaggagaggagaactgcgatgtcggacaacgaggcagagccacggatagcgaggtagagggggaaggcgatgcagaggaggagagcaatgaagcgggagatgtagatagaggtgcgcatcgttgtgcttgtggcttcaagatggacgtgattgaagagcgggaaaggcaccacgatacagtaagacaccgtgtaactgaggcaatttagggccaattcgtggcactggatatgtatggcttcaagaaccagcgaattaaagcatatgtcccttagggttagtctcaaaggcgggggtctgcataggcgacttcttccatcatgcacagtaacccgactatttcggctatctttaatactgcaactatcgcgtcctgctcgctatccccttcctggctgaattatagccatgggctgttcgattttgttcctctacgtactcaccgtcctcgccgtcctcctcagcgcccatgcgcacgaggaacaaccacaaaagtgtagcaaactgctgatacgcaaagaatggcggacgttgacgaacagcgagaaagccgagtgggtgggagctgtcaaagtgtgtcctccttcgtaactaacacgtacggtacattgcttataccgagtagtgcctggcaaacatacgacacgaacggctatccttgacgaaggaccagacggtgcttgaggggaagaggagcctatacgacgacttctcttactcacacgcatcagtggagcacagcgcgcataggaatgcctacttcttgccgtggcgtgcgttccgtccctccttatcttccccaggcgcatacttacatgagcgcagatcgctggttcacctacctattcgacacctcactccgccacacttgcgggtacagtgggccaacaccatactgggactggtcgcgcgatcacgcggacctgttcaactcgccagtattcgaggattcaccggagtacgggctaggtggaacgggggactgcgattcctcccccgaggcagactgtaccgtcaccaccggcgcttttgccccgtcgaccggcaacttcaagctttcctggccgatcaaacacccgctgcggaggaatctaacgctcataaccggctggtacccgcatgagctgcctcaaaatcgcaccctcggcccagatttcgtccgtaactcaaccgagcaaaccacgggcgacttttttaggttccagcgcgcaatgacactaatgcacaaccacgtacataatttcgttgggggcgatttggccggagactgcccgaagaccctgccggaggaggattgccagggcatagcagtcagcttcacgcctaatgacccactattttggctgcatcatacgcaacttgaccggttgtggagtgaggtgcgcccccgaacctatgatacctccccgctccgtatttcggctgcagtgcaacgctactgaccagttttacagtggcagcgccatcatccatccaatttcgccgccttttcgggcatgcctctaaccccgcacaatatgactgacccacgctacgaccttgacgcgcacgcagatcataagatgtccttcgacgttcagagtgtgcccgtggcaccaaggaaggtgtttgatacggagggttggccgttgtgttaccggtatacagacgaggagtgacgggtactagactagactaatacaatatcttggagttcagtcacatcagagtcatattcactcgagttgggttccggcccatctggtttctcgttcttggtgaacggaaacgaggaagcgaggtgccttgctcaactagttctacgcacatagttaggtactctcccaaaccccaaagaatagttgtctagttccatacgacgcatattctttatattcccattctatacccactagattattaactcgactcctgaaaccttgtatacatttctggtgtccactccttatgctggttttccatccaatcatgcacctgtctccagtcccggcaggtatgtacagtccctccgcccgtagcaactttatccccattagccaatttcatgttcgtgccgcccgactctagggttgtgtcagcggcgcagagaatgccctgccgtaggtaatggaagcagtgcgccgtatggtccgacccgtcgtccccattaacaagcaccgcgcgtatatggttaaggcaatgcatctggtgccacatcgacacatcaaatgcgaagtgctcctcccctagaaaaacgaaacccttgccgggagggcggattgcgttccattcagccgtggccgtgatgccttccataccgtaatgggaggggtcgtcgtggaaggcggcttggatggtgcggacctttatggggagctcacgaggtcggtcgccggcgaggtaggctgctgtgcgttagtcatgagtgagaggagaatcaggaatatggcgcactgtatccccgcgttccgcgtattaagatgcggagtgagaagaagagggcgcccagattcaggatgaggcatacgctcagcgctgcgagaaggccgaggtaggggccgcttaatcgggtcacggacttagggaacatattgggtgtgcttgtagggtggtgcgtggagggtagcagagggagacgggatttttttcagcatcaggagcgggttaattgtgtctaacacatctatggccgtatccgctctggcttgggtaggtaagtcacgatggtcccgaagacgcaactgtcgagatgctctattcgccagagtgtttcttcaatgaagtgaagactgccagtaagcagagaagtacacgtagtgcagtttggggctccacaaataatcctaccctactccgtactcatcacgagagatagacacggtgatcatccttggggcaaataatgacgacaccctgatttgacttcttgctcgccaggtggctagtcaatgaatctcgaggaatttcgggttatcgcgcccctcttaggaccaaataggtaggtggttgagaagagaagtaagaattgtgggtaatgcttatctccacactactagtccttccagggctgtgcacgccccactctcgcttcggtccgagacatagttactccgcatctatagagcatatcacatcatatgcattacagatttacaattacatgtaaggcctcctactcctctatttttagtagtgatcgtcgaccagatgaggggacgatgtgagtcggcactttgactcggcacctctcttgttctgtttcggatcgcaaacgcataaattctcaagggcataacgagcactgacaacatctcaacgatccaccccttcatctcacacaaccaaagcatccgctcgctgccaaactccaacaatgcatttcaccaccctgctcagcctcgccagcctcggcctgaatatcctccctgtgcagtccgcagcagttcccgccgctgatttggctcgccgcgccggacagccaatcagccgtgtctatcttcctaacacggtcgagaagaggcacacctacggagtggatgaagacgaggcgctcgagaagaggcacacctatggagtggataaggacgaggtcgtctgaatactgttcggcggcagataaccaaagtctcgcatgtaatgaggttttaaaacgtctataacatgttctacaggcgggcaccgcattctcttcacaactttgttacatagcagtatacattatcaacagagtatatcaagcactatcttggctatcttttctgcatgtacatgtattatgtccagtctctctatacattgtaaggcgcgctagagtgccgttgcgttgcgcaattgtacattaagataagagaggggcgcaaagttgcaccttgagaagcgtaaagcgacacacctacggggtggatgaagacgaggcactcgaaaagaggcacacctacggagtggatgaagacgaggcgctcgagaagaggcacacctatggagtggataaggacgaggtcgtctgaatactgttcggcggcagataaccaaagtctcgcatgtaatgaggttttaaaacgtctataacatgttctacaggcgggcaccgcattctcttcacaactttgttacatagcagtatacattatcaacagagtatatcaagcactatcttggctatcttttctgcatgtacatgtattatgtccagtctctctatacattgtaaggcgcgctagagtgccgttgcgttgcgcaattgtacattaagataagagaggggcgcaaagttgcaccttgagaagcgtactacacataataattccaggacaagacagccctccagcctgcatctacaagtactcatccggcatcgggataagtgtctcattgttagccgcacacatagccggatgttcctccggaagagcctccatgtcagccatcttaacgtcggagcactatcattgcatcagcatcagctctactggggcaagccagagctactgacataatgttccacattccccgtcttcggatccctcgcttcgaagtatataactcccatctcgttgacctgggtctggaatggtatcgtgacattcacacacagctgtcccgagggttggatgggcacatcctgcaggatgatgtagggaaagtcatctctcttccttggtactctatgtcgagtatagagggccgtcacaaggtctccaggatggccggagaacgagagaaaactacgggagcggcgggagtatcgttgggggttatgcactatctccccttctgtgtatcagcctacggtactactagaccggagacagaggaacataccgcagaaagggttgtaccaatctatctctgggcgggccttggggtttggaccgcgggtcatccatgggaactggacgtggaagccggcatgcgcggcggatgtgaggttgatgttgatgccgagggcaagcaggaaggtgattgcagcgaggagggagggcatggtggacagaggtcagtgcagcacggtgtagagagcgagggcaagttgaagtgatctcagacggtctcactccttggccgcgatgatctgtttgaccatgcagaaggactgagtttctgatgcatcgtaactttactatctatggcaaaacttaatcggtccaacactgacccaaaccccgatgtggttctctgcttttagataataataaaaatcttagaaatagtgtttttacaaattaagttcgtaatactaattcaatgatatggtcgagatatatatatttttggaagtaccctttatatgtatgtcccatagaaaaggtacaatttgcattggacccgcaagatccaatccccacttcgggcccccggcggggccccggcgggggccccccccnnnnnnnnnnnnnnnnnnnnnnnnnnnnnnnnnnnnnnnnnnnnnnnnnnnnnnnnnnnnnnnnnnnnnnnnnnnnnnnnnnnnnnnnnnnnnnnnnnnnnnnnnnnnnnnnnnnnnnnnnnnnnnnnnnnnnnnnnnnnnnnnnnnnnnnnnnnnnnnnnnnnnnnnnnnnnnnnnnnnnnnnnnnnnnnnnnnnnnnnnnnnnnnnnnnnnnnnnnnnnnnnnnnnnnnnnnnnnnnnnnnnnnnnnnnnnnnnnnnnnnnnnnnnnnnnnnnnnnnnnnnnnnnnnnnnnnnnnnnnnnnnnnnnnnnnnnnnnnnnnnnnnnnnnnnnnnnnnnnnnnnnnnnnnnnnnnnnnnnnnnnnnnnnnnnnnnnnnnnnnnnnnnnnnnnnnnnnnnnnnnnnnnnnnnnnnnnnnnnnnnnnnnnnnnnnnnnnnnnnnnnnnnnnnnnnnnnnnnnnnnnnnnnnnnnnnnnnnnnnnnnnnnnnnnnnnnnnnnnnnnnnnnnnnnnnnnnnnnnnnnnnnnnnnnnnnnnnnnnnnnnnnnnnnnnnnnnnnnnnnnnnnnnnnnnnnnagaggccccgtgggggggcggcgggggggagccccgcccccgcctccttggccagcgatgacgaacgcacaagggtccacttggccatgcggaagggcggagtttctaatgcactgtaactctactatctatgatgtatggcgagcgcggtgagcagtaaggcgtaccaagcgtcgggtcgatccgtccccgccgccttgtttcgccatgcagaagggccaagtttctgtaactctactatcttcggcgaggtgcggtgagaaataaggcgtactaggcttcatgctgtcatactttctgagcggttacctggaatgggtgccatagcctgttttacgttacttgcgtttacctgcggcgtgccctctctctctggctcgctctgctctcgccatgtcctcctctcaaggaaagtccagctcttcccaatatgagcctctttcactacaagatgatggagaaggctccagcgcaacttttgagaagcgctcctccgaggacgaccactctacccccttgttggaagcctcggacaacctccccgccctcgcgccatccaagccctcccagctgcccaagctcatcctctatttctccttcgccctagcgctgctatcagctgtgaatgtcgctctccttcccactacactatcaaagtaccaagcctaccccttctctgactctgacctcgaggccctcccctatggcgacgctaggctgggattggacagggtagcgaaattcattccccctcccaaggtctatcaccacacttggccggatagaattgcacgagtgagccggagattgaagaatgccgtgtggggtcagggggtgcaggtctatgttactgtcgaggtccgtactccgtacttgctccttcctcattctcttcactgacgcaagagaaggactcgacaattatgcgctttcccatctcccccaccggcgtcaacacctgcgcactctcctggcggccacctcccgagttctctccgcgtgccaaagacctcacaaccaagggagatataacagaaattgaagtctggcagcttatcgcaccctcagacatcttggctaacgtctcttccactatggacgagctcgattatgataccttatcgtattcgacccttcccgtgcgcggggagctgctcggcgtacttgaccttacagccaagccgaacagcacaacactggagttcgcctgtccccgcggggcggagagtctagtagtggaaatgaggtgccagcgcgtggcgtgtcatgtgagctttatgcaaattcatatagcaccgagctttgggtttgagttgcttgagagagcataaagtgttcagataaacttcacatttctcaactagctcaacaaaagcaatcaaatagcattcatccgaataagaaattcttttcattccaaaaatcaccatggccgtggttatttttggaagaaatccagctggttgatacagtcagatgtcctcgttggaaaataaccgtccatggtgatttctggatgatcgctggcaaaagggtgcgtgttgcaatggatgagaaggatttcttatttgtgggagatgtaatgactcatgaggatagacatgactctaaagattcttaaactcggaggaatcgacctcgtacttatagaaaggcatcgggtcaatctagaaagcggggtcgttgggtagaatgttcttttactatcgcgatgaagcgtctgccgctttggaattttaccttgataactagtaccacttcgtaccctatctataaaaggtcctataccaagaagttgaagtttcaagaaaattgccggcaaaatgtcccagagttatctcaatccaaatactccggagtccggtagatgcctgaaagagtggggtggggctttgtcatagtaaaagaatgtcacaatatcaacccccagtagcttaccccatactaatcttgcggtagtgtgtggcactataagatgtccccataggcagctcttcggttgctactacgcaaaacccactcggccatattgtgtctaacacccatcgagctgcactcacaacatgtccactcaactcgacgccgcctcaatcgcccgggtctccttacacgaccccgctcacttcagcatccagcactcccaaaccatccaccgcctagtgctcctgcagcattggaacattcccactgactccaaggtgctggaattaggatgcgggcaaggagactgcacgactgtccttgccaatgctgtaggcgagcatggtagagtagtggcggtcgatccggcggatttggattatggtaagtcctctagcttttctgaccctgctgcctgtcctgggtcgactgatagcccccgcaggtgccccatatactctcggccaagcacagggtcacatctcgcaaggcccgctgggtggacggattaattgggtccaacaaacccccctggactacctctcttccctttcctcgccgcccgccagcgaaagtaaggccttcgacgcgacagtgctcgcccactgcctatggtacttcgcctccccatcgcttatcctttccaccttccgtgccatcaagcagcacagcaagcgtctcctccttgctgagtggtcgttagtagcgacacacccctccgcccagcctcacgtgttagctgcgctcacccaggcagcgctggagtgccgtaaacctaacagcgaatcgaacgtccgcacggtactgggcccaacgcggcttaccgagctggccttagctgctggatggcaactggagagcgaggccctcgtgcaaggtggggaagggttgttagacggacaatgggaagtctctgcttgtctttcttcctctttcgaaaaggaagtagaggagctagtggttgatgagagagaacgggccgtggctattgcgtcacgggatgcgtgtgaggcaagcttgaagggcatacaagggggccggaaaggagttagggctatggatgtttgggttgctaatttcgtctgattgggcgagctgagcgtgtccgactcctagacctcttctaagcccgatctcttgatcgagatttgccgtggaagattgcctaaagaatatgtcttgctgcgatatatcagattaggatcctccgaaagttgaaaattaggtgctcccgacttcctaattaaaaatccggtgtatgttggcagtatatttgatagttcatggtactggtattcccgccaagaagaggcttgtagcgtgcatgcactagcgtcccttctcggccgggccggcatggcagggtagaacggaatcgaaacagcaattaaaaacaaccttacatatcagaaccaggttgatactaaaaaatgagggagcagaagcatttgcaatagacctccgacaatccggcagaaaactcgactaatgtatctgaagccacttcttggcagtaataccaagaccatgaattatcgaatatactgccggtatataccggcttcctaattaggagattgacagcacctaattttcaacttccagggtccagcggaccgcaatgttgagacaacactaatgcacgggcggattgcacgcctttattttgccagtcgaaaaattcattattaggaataggcggtctatcaaagcggtcaaaagtggacatgctggggttactaatgccttcgacctcatggggtaattatatagacggcctatggaattacaaaattgtccgacctttagaaagctacacatgcataaatgcttatctttggtcaaattaactgcctcggccgcgcataagcaagtccaggggtcggcatataacccctgctacttcgtccagagattcgaaatttgggatgaacttcggattctggcagatattttgagccagcgataggaattacccttgccccgatgtttctctagataattatagctcccattattcttccttcctagcagaatgcgtgacattctaccatcacgccatcttgctggtcccctttcagtactcattccccgagttaggccagctacggccagtttctataaccgccagtgcgccacgatattttcaatagtaagttttgacctagctcaccggattttcatcatttgctcgttactatacaccattcagtcaggcctcgacacatgagctctttgaatccaattttaacgctacttttgcgagatggcgtccgatgttttgcaaacgctgcagttctggaatatgctctaatacgtgcatgacagctatcgaccaatcccgcgcttatatggcgtcgcttgcgagggtccgtatttttggaaaagaaatttcaaggggccggtcaatgcatgctcgacgtcaaagactcaagggacgctcttgttcgtgtcaatctgacctagacccgctaagtcgcaggctatattccaatctttgaacaaagctgagagaaaaaaacgtattcactatctatcgatgtgattgtaaagtatatgcctgggcgcacgtctcttccgctcggccaaaagaccattatctatagtagtgcaatgcttatatcctaccgtagtgtatgcaggtgcgggttcctgactttccgggtgaccaacctataggggaccaaagaacccatttggtagggtcgatgtgaatctgacctgggagtcgattctcacaagactggatatctttggactcgacctgatctcgagtaagagaacagccccgaatcacctgcgtcatctcgggaggatacacaaccgctgcagggatgtccgcctattcactcggttccaggcgttgataagttgacaaagagcaggaagatccatgcaacgctagccatagcgtcaccgagtaaccacgaggccatttgttgatgttagtctagactttctcggggataagaaagataaaaccgttaggccgtaaaaccgagccccacactacggactctggagtaatggctgcggtatgcgacgctaagaggtgctacttaatataatcagtctcagcagcgaccaaccgcaggctcgtaattctcactctactacagtgccagatcaaacacggcggagaccccggatttcttagagagagaatggcattcccatacaagcatttcttggttatcggcgcgacagctggaatcggcaaggcccttgcgactcgtttaattgagtcgggggctaaggtcaccgccgtgggtcggcggcaggaccgtctggatgaattcgtgcagactttcgggcctacacatgcgaaaggcgagcggttcgacattggagagttggtcaagattccagattttgtcacaaggtacggtctatttcccgaggtccttagccggggctttctacatactaacggggtgatggacaacaaatagggtgatgaaggaatcgccagatattgattccattgtatttaatgctggggtgcaaaacccgtacgatctggcagatctcgacaactttgatctgacggcgtttcaccaggaagtgaagatcaacttttccagcttcgtttctctcacccacgcccttttgccatatcttcagaagaacccgaacccaactagtttcatcttgtaagacgcctacccggccgcaatctgcggcaagagctaatggatgtatcagtaccggctcgaatttggccatcgtgcctgccgccacgcttccggcgtactcagcatcgaaggccgccctgaatgtctttactctctgtttgcgggagcaactgcggcactcgaacaccaaagtgatcgagatttctcctccaccggtccagagtaaggcaaccctggccccataatgttgatatttcagtgctgacctttagctatagcggaattgcacgactacatgggagaggatgcgggtcgccagttgggaatgcccttggacgcattcacgcagcaggtttatcagggactgaccgagggcaaagatcagattgtaattggcagtattgggccagaagacacattcaacgggattgtggacagccgtcgcactgccttcgagaacctctccaagatgatgcgtggtgggaagccctagacaggccgcagatctacggacgatcaagaacgctgcgttcttcgattaacctagagaccagctggaatgaatgctacttatgtttgaaatctctatgccatcaagtctttgtatttaccttcagttcatgtaccctctcttcgccttttagtaaagccttgggacgctcgaggagcgccttgatggcaaccatctgtgggccactgcggtacatggaactactgtagaatgcataccccgtaggccatggtgatcgtgaaataacaaagaatcgagtagccggtccattacagacgcggtctgggaaaactggtgcatcttctcaggggctagttaccaggtaactagttttaccgtaactgagtgactgatcacagcggtagccccaccatttaagccagtattcatagtccaacatccccgcgatttgtatggaatagacggactcaagccaccaggggtcaccaccccaacaaagttgcccctcgcccatatacatatcctgaagtcttccgcacccacccagaaggttctgtgggaaataatgggcaatacaactctggcctcaatccctcagtccaccaaccccgatgtggtcgattgggaaggcctagatgatcccctgaatccgatgaactggcccctgagaaagaaagtcgctatcaccatcaccgtggcactgctcactattttaacgtatgagactgcttcccaggcccccttcgtcggtagttcggaaactaaaacgaagagaaatcctaggccactgggatcatcaattgtagcaccagctgcctcccagatcatggaggaattccagcagccctaggatgatgagttgcgtgcatttgtagtctcggtctacgttcttgggtacgcttttggaccgatgatcctcgcccctctgtctgaattatacggacgcaacataatctatcatgtctgcaatgtactctgcctcctcatgaccatcacgtgtgccctggctcctaaccttctgggcttcatggtgtgtcgtctgctggccggcacggctggcagtgtgccattatccatcggagcaggatcgctcgcggatatgattccctcaaagaaccgcgggttggcaatgggtgctcggtcctgtgcttggacccgtgacagcgcccataggtgcgtatctcctgacgcctggagcatactgacagatacagcgggcggatatttggtagagtctcaaaggcctttgatgcaggcgccaacggttactgtcgaggagaaggggtcggagtagtcgtgctcaaaaccctccctcaagctcttgctgatggaaacgaagtcctgggatgtctatacgacgttcgacgaggtttccgagaagaagctagtgaacgacatcctagtctttcaccctgtcacaggtgaactgtttgccatggtcatgggcgccacctttcatagtgtcgctatgaagtcactcgtcgccatgctggcgaatctcaatacgcctggtgtgagtctggcgaatactcaacctgcgacaaatggaacaaagggggtgaagaacagccaaactttgaattccgtacacaccaatcttcattccacaaataaccgggatagtggtagcattgttggtattgaacagaacctggattggattcttagtgtactacggcaactactcagctcagcgactgagattcctgttaacgagattgcaccaaccacttatctggcaaacattgggatcgacgcgctcatgagtacggaagtcttgagcgatataaggcgacagtttcatgttgatattccgatctccgaattcatcgctcttgacacggttctcgccatctcgaagttcccgcagcatgcatttgagcacactctactcgcatccacgggttccaaattcgccgaatgtcttacccggaaagccgacctactggagatattctttggcagtatcaaatctagagccttgctggaaaacgtctacaccaacgcccctatgttcgccgctggctcagatacgctgtggcgcatataccacccgtactttcatcattcacggcacagaagacgatcttattccctggaaacaggcagtgagaacttttgaagcactgcgacaacgcaacgtcattgcagacctccgcattctcgatggtgcagagcaccttttcgatctctacccaccttacaaagatgatttgcaggcagcaaaagttgtgcaggatggatatgaatctcttcgtaggcacgctggactgtgattagatcttgtgcggatattttggcacccatcatattatacttagaaagagcattacccttgtggatatatgtgttatttgttatgtgaggcgagataaactgtcgagttagtcgtggcactaagcattactgcaactttgtgaggatagggcctaatctgaagtggcaaattgacaaaggaaacaatgaagaaccagcagatgtgacgtaacctagagaaacattgatgtttattatggcgggcagaacccttaggcggtaggaagcaatgagccaatatgataacacaaaacagtccaaaggcggtctaaatactaattgtttaacaaactcgtgcaagcccatttaacttgccataagtgattgtagagcgaagcgaagtacagtaattaagtcatagcctcgtgtgcatgtcatatcaccaggtcttgtcacctataggtcccaaaatcattgaaattatgtcacgtgaagtgttatcggctaactttggcagaataacccaaccggcagaataaatacatcagtccctagagaatgaaccatcattatattccccagagcttctagccttacaccgaattagcttcatgtcgttgatagatcattggaatatttcatacaaacagaatacaaagcttttctacatgttacgagatcaggccgtgtttgcactatttacagtgctgcagcacccccgcagcactgcactaccgaaccaagggtccagtactgcagcgggactagtgctgcggcaccagtgctgtgggatttctcaaggcctaaactgttaactagttagttaaatagactatattcgaaaggatattaagaggataaacacggttggcacagtattaagagctatactagcttcctagttttatgttgggacagagagagaggaggttacaacatacaggacgtattgaggagctgaacccaaataggcaaaactaaccacatacagtagttcacaggtccgccgtttctatgcataattatctggatctattccctttttgttctttagtgctgttaatatcagtgggctgacaacgtagcacgtgagtgatttgaataacttggctagagacaatattgaagttgttatatatgacacatgacggatggccggactggcgggccacttttcttttataattagctcatccgcacacccgaagatgaggccacctcgaggtattcatatttgaagccggtgagagtactgagtactcaggtcaagagtccagtaactatatactatggcaacatctacactagctcaatgaaggataccggtgtgtgccggaagacaagtatgtattacacaaggtggtcaatccatttgcgcactgaatatcgaacttttatgtatactagtcaattctctttggattgcctacctgtcgtatgtccggggtataagcgcccgtataaaaacagccgcagggagacatgatccctgaaaggttagtaggtatgaagtatgaagaactgcatatgtatgtagtatagcgcttggcttagctttcgcaatttagattagagatatcactacatgaagaaatccccgcatatcagagaacaaggcattgtcatacataaatattaatactccgtgaatctatcaaagatgtcaaagtggattgattcatgacgttagtggggaatccagactcaccgcattatgcgcctccttgaattctgtttcttctgtttcttctgttctgtttcttcgggttttttatcttttttttattcttttctttgtgaattcatactataatccattcctacagactatattctccatatcttactcggccagacccccatgttgggttaagttctgcttcttggtccttcggcttcgggtcggaattgcccctaatcttcccgaaattctcgtatttgccattcttcatataacctcaacctcaaaatgttaccaaaaaatgtccagaataaggcattcgttgcaagggtgagtgcaattccgctagatctctgtttttgtctgatatgcacggggtcggtacattgttacgttgccgaggcttgcattatgtgtatgtgggttaggttgattggggattgtttgacctcatatgttacatgaagtataagaaatataagatgcctaaatcgcatcgtccgcgcgatactgcgttactctgatcgcgcgttactgcgtttgggactactatatcttctgtcttgtttaccttctgtctcttctctttctcacaactcccacaatcggacattctttcaatattcatctggcttttcttcgtgaaaggcacaactcagaatgttcgccgttaacttccttccgcagtccgacgactcaaagatatgtgttgtcatggtgggccttccggcccgtggcaagagtctcatcgccggcaagggtaagtgaacctgccatccgtaaatgaatgtgagactaactccgcgactagccatgcgctatctgggttgggtcggtatccctgcccgtgtcttcaacgttggtagctatcgccgcttcagcaacccgcagccaggagccgccttctttgacccccacaatgaagagggtgaacgcatgcgccgagctgccgcagaggctgccatgtcggacatgcttcagtggttcaagaccggcaagggtattgtcgccatcttggatgccaccaactccaccaaggagcgccgcaagtggatctatcagaagtgcactgaagctggcattgaggctctctttgtggagtccatctgtgatgacgaagatctcatcatgactaacatcaaggaagtcaagacgacctccccggactacaagggtcaagatcctgaggtcgctgcccttgatttccgcaaccgcattcgcaactacgagaaggtgtacgaaaccatcgacgaagatgagaagaagtacacctacgtcaagctcatcaacgtgggatcgaccgtcatcatcaaccagatcaaagattacctgtccagccgtctggtctactacatccagaatattcacatcaagcctcgttccatctggctctcccgagtaagtcaaaacaatacagtttccaaccattatgtgaagccttactgacgaaaatagcacggtgaatccgagttcaacctgactggccgtattggaggcgactcgaacatctccgagcgcggcgaagcctacgcccgcgcacttcccgagctgctgcgcaagtctggtgtccctgacaacaccaagatcgtaatctggacttcgactttgcgtcgtactattcagagtgcccgtcacctcaaggctgcgactggctatgagaagctggagtggaaagccctggacgaacttgactcgggcgtttgcgacggcctgacctacgaagaaatcgctgagaaataccccgaggatttcgctgcccgtgatgaagacaagtacaactaccgctaccgtggcggtgagtcctaccgcgacgtcgtcatccgccttgagcccatcatcatggaactggagcgcagtgagaatgtcatcatcgttacccaccaagctgtcctccgctgcatctacgcctacttcatgaacgtgccccaggagcagagtccctggatggaggtgcctttgcacactctcatcaaactcaccccccgcgcttacggcaccgaagagcagcgcttcaaggctgatatccccgctgtctcgacctggcgtggaaagggcacttcggcaaagcaccaggaattccccgctgagggaggaaagaaagaggacactgagaccaagcactaggggagtgttgatctgcatcggcgcggcgtcacctggatgtggggggaattcggattgcatgagatattcagataccacaaacatgcttttcctttcattatgcgttagttagcctactttaactgaacaatattattcttacaaatcactttttaccgcgggttcattgtaatattcacgcgttatcggaaagttgaagttttcgacacttgagcgacgactgagcgacgactgagcgacgactaagcgacgactaagcgacgcctgactctcagttaccgctcacttctaacgcgcgttacattctaatttgtttctatcagagaaaacttgtatgaacaaacgactagagaatagggcccgcgcggccagatctcgggatatagttatgctgactcagaactgactcagctcggacgtcatgcggagagctccagcagcggcgctcctcgaacctccagtggaaggaattgaagacagcacgcccatgttgtcagcattcaccgcgcggccgctcgtggagctcaagccgcgcgacaagtctcgcattgaatcagtcctagcctacggtgaccgcctcctcactggtttgaacaatggcaaccttcgcgtctaccgcgtcactgacgacggcaagaccgagctccttcgagaactagagaaattctcccgatacaagattgaacagcttgccttgattaaggaggctaacgtactagtctctctttctggtggttatgtctggctccacgatgcgcagtcgtaccagcttgttgaacagctaacccaaacgaagggcgcttctgtatttgccatcacgtcgaatgttgtcaatgatcccgatacaaatgtgcctgctattgtttcccgcttggcagtcgctgtcaagcggaaaattctcatgcgggcgtggcgcgacatggaactggagcgggatacggctgagctgagcttggttagtggggtcaagactctcacctgggttgcggctacgcgactagttgttgggctaaactcgagctttgtcatggtcaatatcgagaatggacagtccacggacctggctgggccgggcagcattgaggaagcaggccggttcacgggtgttggcgccgcgagcatgagttatattggtatgggaggcatggtgccgcggccacttgtgacgagactgcgtgaaggtcagattcttctggctaaggatatcaacacgagtttcatcgatattgacggccaacctcttggtcggaagcaggtgccttggagccatgccccggtggagcttggatactcgtacccgtttctgttggctttacatgactcatccaaaggtgtgttggaggtacgaaacccggagaccttgtcgctactgcagtccatcccgctgccgtcggctagtattttgcacattccgcagccgaatatcagcctcgcccatgccggtaaagggttcctcgtggcgagtgatcgcacaatatggcgtatggaagccctgagctatgatacccagattgatgctttggttgagggtggttatctagatgaggctatcagcttactcggcatgctggaggatgctctcttacgggataagcctggtcgactgcgcgcgataagacttgaaaaagcgcagagcttgtttgccttgaacaagtaccgggagtctctagatctttttaccgaggtgtctgcacctcccgagagtgtcattcgcctctaccctcgcttgatcgcgggcgatctctctatagtcccggagtctgaaactctgaatggaaagacgaacggatcgagtgatgggtcgggtgatgatgttgttgctgggcagacatcaacacacgcagcctctattatatcatctgtgccaaagcctgatgaaggaagcgaggctagcagtatccgtggagacgacaaaggtacgacaagctccccttttttttgaatatatgctaattaatcataggtcttcgaatcgctgtccgcgagctacaaggatacctagcagatgttcgccgacgcttccagcgcttcctcaaccccgacggatctctcaaagctgctataccagtcgaagccacagatgaggcaagtgactcggttcttaagttactagatttcccatctcccgatgagtttgcctcacgaatttgtgccaaggcacggttggttgacaccactttgttccgtgcacacatgttcgcgacgccatcactagctggatccctcttccgcattgccaacttctgcgatccagaagtagtcatggagagactcgagggcactggcagatataacgacctaattgatttcctttacggcaagaaattgcatcgccaagcactcgaattacttcagcgctttggacagacaaataacggacctctgagcggcccgacacgcacagtcgcgtatcttcaaaacctacctccggatcaaattggcctggtactcgagttcggagaatggccacttcgtgccaaccgcaagttgggaatggagatattcctgaccgacactgaaaatgctgagacattgcctcgtccacgggtcctcgcattccttgaaaacatagacaccgcgcttgccattcaatacctcgagcatgtcattgatgaatggaacgacatgacgccggacatacaccagcggctgctcatcttatacttagatcaaattacatccaacgagcaaggggaatggaaggagaagttcttgacgatgttgaaagagagcgagcaatactcgccagcgaagatgttagatcggctcgatcgagagggtacattgcgcgctactcctgtgaaacaagccatcactgacatatcccagatgccaacttctacgaagcccgagctattttgtttagcaagatgggtcagcaccgacaggcgcttgagatctacgtcttcaaacttgcggaccacgagaaagcggaagagtgagtgatatgtgacttcaccaagagcaacaattgctaacaccagaaagatactgcaaccaggtccatctcgccgaaaaggccgaagaagagaattccatctatctcatcctcctttccctctatctcaccccaccccacggctatgagccccaaaacgaccccgcgattgaactgctagccaaacacggctcacgcctcccagccgacgccgcattgaaactcatcccggacaaacaggccgtggagaaacttgaattctatttcaagggccgcatgcgcgccgcaaactcaattttcaatgaagcgcgcatcgtggcaaacctgcgcaaggcacgggatatgcagatccaagcccagctcgctctcggtgagggaattcgtggtggaggcacgcgggctcgccacgtcactgtcaccgaggagcgaatttgcggcgtctgccataagcgtttgggtgggagtgtgatcaatgttttccccgagtaagtcgttttcagtcatttgcttttggtttgttcgtcgctgacttgttttccagtgatacggtggttcacttggggtgtgccaatcgaagacccagtgttcgagttgggtagtatgtttgctctctgcatctgcattcgcgaggtcggtgttgtgctcgttcttgttcatggtcgtcatgtcatgtccgttattttatttttattttttgttctccagatcaagcttctctgttcatttggtttgtttggtcgatggagactatcccagcgactttgatacccatagcatctgcccatttcaagatacatccggtcatgcaaatcatgcatcgtcctcaacaacctcctctccgtaattttcctcctcctgagcttcctgtgctgagatctggccctgcactttgtcctcttccatgcgctccgtaaggaagacgttgatctgctcctgcagcttgggcacgagcgactgcagcgctgagaggtgggcttgcttagccgctaatgtgccggttgtggttgatatcacatgctcaaaggtctcagtggcatgaggggcggtgtagactgcagtcaagctcgtgttggaggccattttgaaatttaacagggaagttggggaaattgttggccctggagggggagatggcagagaataatgtcccaagctatcctaccgcctttcttaccgccttttcgctgatctaagcccgacctcgggacttggcactgcttccccagggtctcagggtcccagtccttcaggtacggctgaatacgaagttatgtattactcgaggtacttcgtggaccatacggtagcattgccgaggctaatatctgttgggttctgttcaggcagtaatccctagtctgtatccggcctggatgcatactagtaagaaatttgtggaaattggaaaaaggaatacaagtgcaagggatgacatcaagcagttaactggtctacaaatataaatcgcaaggctataaactccgttgaatctagatcaaagcttagccaagtctccgcatctttcgtcgatctgagattctgccagataaaggtagaggaagggatcggcgactgcccagatgtggcttttgtaacgttgtaaacaaaaaacttcgctgaaagataacctgcctgaaagagacaaagacagagagagcatgggatattcattatgaatcctaccttccgatccccgaactcgcctgggcgtcaagtacctcctgcccctcgctacccccgacctccatctgatgacgaagaggaagacgactccgatgaggacgaattggttcaccccggatcctccggtagtgacgcttcttccaatgtgacaaccgtttccgccgctcctctcacgccgatcaatactcaacagtccgggggttacttccccccacaaccacgatcggccacttcacctcatcaccctatgccaaacccaacagctcgacggccctccggcccgggggccccccccccgcnnnnnnnnnnnnnnnnnnnnnnnnnnnnnnnnnnnnnnnnnnnnnnnnnnnnnnnnnnnnnnnnnnnnnnnnnnnnnnnnnnnnnnnnnnnnnnnnnnnnnnnnnnnnnnnnnnnnnnnnnnnnnnnnnnnnnnnnnnnnnnnnnnnnnnnccctccgtcgggctaccccggcaccgatcacggcaccactcacaggggttcttcgagccttccctgccgaccgcctcctccgaccagctccctaccgtgtcagcatcccgtatcgccgcccaggcagcaatgcagcagacaaaaaggcaacaaaatgtgatgcccccgatagaggatggttctcgtcccaggcgcagtggaagcggctcgcctcctctcatacccgctccgttgcgtgtcaaccaaccctccccgcaaccccctccgccactagggaatgtggccacggcagctgcgaatgtggtcttcccgcgagccggtgctgcgccggtagaaccacagcccgagaaacagaagaagaagaaactcttctcaaaaccaaaacatatcggaatcagcagtcataaagatgtgagcaaagaccgtggtcttccctctccgagcaagatcagcgggttatcgcgcatggtcagcggctcggctacgaatttgaccgacctgtcctcgaacaactcgatgtataatctatccaatgcctccgtgaacactgtggtccccgcagatcgtccgccgcttccagagaaggaaaaggataaagacaagcataagcatcatttcctatcgaggcagaaactcaaactaaaagatcgcgtcgaagaccacttcaacctccctctatcatcggcttcgagtaattcccgtccggcagacccaaatgccccacaatctttatattcctttactcctgcgtctccagctcctggtgcgacatttggcaagtcggtcagtgggttagatctcctgcatggtggtcgagcgctgcgtgagaagaaaaaggaggaaaaggcgctcgccgagtcggagcagatggaatggctggccaataatactggcggtcctacgccacctggcggcttcccaggtccgtcttcagttggtagttcggggacattccctgagtctattcttcgggagaccttgcaagggtttgggttgaataatatgaccccagaggatgcgtgggacttccttaaggcgaagctgctggtcatcttcgatggcgaagacgtgcgcattgccattgaagatctcaacaagctagtgctcgttcatttgcagcgttgcgtggttaagagggctcctgcgtctattgtaacggacttgcaagaactcttgcagactggatttgcgactttgaatcacagttcgctgattggcctcccagatgaaaggttgatcccgcatctggtccaggtgtggctgctggtgtttggcacaattctgccattcattcaggctgtgtttcttcccttggatctcgagttcaagggctgtggacccttgatgactagccgagaagccggtgaattctggggtgcactgcctttcggcggaacactcgatgtgcgaagtctggtcttgattgccttccgtgactgcatgatcctgaatcgctacgatgcccttaaagcaaccttctcccggctcagcctggactccatcaacaccggattcccgacactcagcgtcacaactaagagtaccggcactggaggccgccctggtactgcagcctcgctcgatgccggcttcggtagttacaactcgcagtcatccacgcttctcagcaccgtcgacagttactcctccgacggcattagcgccatgaccagccacccacgtccaacgagcagtgactctcgcagtcgcgccgcctcaaacacatcttccaacgcagatcccctcttcttccagtccatcgcatcacctccaacctctaacaaacggcctaccatcatccaccgcggccccactgactcctcccacgtcatcacagagaccgtcggccgcatgctgcaatgcatcagcgtccttgccagtgtgcaaacgggcgacgctgcccaggagcggatcgagattctgagcaaatctctcaaacacaactggcttggtcgcggccgcacaggccgtgatcgtcgtggctttgtcggtgccaagatccggcctgtaatggtcggcggtcctcctgttattgatgatggagattccctcacgacggctggcattagcatcggtgcgagtactagtacagggggatcccggggccgaggtgactcgtcctcctcagaatggagttccaatgtcccagggcccgccatgagtgtgcgtggtggtgttagacgagaattgagtgttctatagctttgtgtgttttcttctagctactcgttacgattgtatgtatgacggcgggtgggtaccttttggcaaggggcgtttctgttttataaaggaattgatatcctcgggcattgcccagcaatttcatctacgaatcatatactaagcatatgccaaccggcaagtaccgccccggaggatgatagtaagatacaagaagggccattgggccctacctttatgataggagatgcagaggccaataagatcggagaatcgatcctctactacgtagtcgacctagatataaactacgatactattctactctgtagggaattgtgtgaatcgtacaatttttcttttttttttggttttttttttggggttttttttttgggttttttttttttttttgaatccaacagtactccgacaagtcagttgtcgatacgtacccagggctcggccaactagccactgggtaacattcacaattcaacagaggggatggcgtctcaccacgccatcccctcaaacaatcaagagagagggcttactcccgagccctcccctttcccttgacatcgaccttaccagcctccttgaggtcctggtaacggtaccggcaggcagtggagagaaccttccagccaatctgctccgaaacatgctgagcgatgagcacaaagtgcccatcattcagcagctgcgagccaaattgctgcaaggcctccagaatagccgcctattgaatagaatagttaacaaccagatcaactgagattgaggtcagagaaagggtaaagtgaatacttacgtcgaaaccaggccagggaccaagcttatccacgatccgtccccagcgcctggtcactgcccgccatgtcatctcgtcctcccattcaaatcgattcgcgttccacgcctccgcgacctcgctccaccttaccgcaggattcccctgcttcatctgggacatcatcttgtcccctttcgatgcttcctcccatgacgccggcggcttgttgccccgccttcttcgtttggaggcgggttgctgggcgccggagggttgagggggcccgggaactgctgtttcggtctgagagttagtactagaatgaggattggatgatcctgatgcatacgaaagctttgacttattcgcgggacggcgacttgtcgaagccgacgtggaaggaccagactcagtcttggtcttagtctcagtcttgttcctaatcgaagtgcggcgtgttgcggtcgacgcaggtgggggcatctcaatctcaggcttgaccgtggccttgagcgaggcgtggcgtgttttgatagacgcaggctggggggtctcggtatcaatctcggcagtcgtcttcggcgaggcgctgggttgctgtaccgaagcggaggttcgggctgagacggaggttgagggcaccggagtcgagctcttctttttggttgcacggcgtcgggcacgctttgcgggtctgtttgatgttggggatgcttcctccactgacggcaatgtctcttcagcagatttagcacgtttttcagacttaggtgtatcagcttgagatgggccaggcagatcgcgggccttgtcagccagctcgcggtccatggcagcccatttgaggtccatcgcagctcgttcgcggtccatgtcagctagctcgcgctcattggcatcccaagccgacatggcctccatggcagcccgttcgcgggtcatgaaaggcggattgagggccatggcagcccgttggcgggttatttcaggcagatgatcgcgggtcatgtcagccatatcgcgggccgtagcagctcgttggcggtccatgccagccagaacgcggtccatgtcagccagagtcaggtctacggcgggcagatcgggggccatggcagcccgttggcgggtcgcttcaggcagatcgcgggccatttcagccagagagaggtccatgtcagccataatgcggtccagggcagctcgttcgcgggctatgtcagctggttcgtggtcaatggtagcaccaggcagatcgcgggccatgccagctagctcgcgctcattggcatcccaagccgccatggcctccatggcatcccgttcgcgggccatgttgcggtccatggtagcccgttcgcgggccatgttgcggtccctggcagcctgttcgcgggccatgtcagccagctcgcggtcaatggcagacccaggcagatcgcggtccatggcaatctgttcgcgggccatgtcaaccagatcgcggtcaatggcagcccgatcgcggtcactggtagcccgatctgtagtgtgtaagaaatcgaagtctaggtttgcagtggcagacttcagatcagcaaagagactgtcagtatcctgattgttcagcttttccagctcttcttgtatgcgctcttgttggaggtgctcattgtccaggatgtcttggtagatttcattcttatcctttttccatctgggatctccaccagcatctaagttcaggagctcctgctcatccgcgagaacgcgttcgtactgttcagtagataagatgcccatggggtcagtggtccagctgttatcgggagtcctttgggggtaagtgtagtgggacgggagcacatttggatcttcgaataggccatcatatgctggtggacgttcgaatctgtcaactccatattctactggacggtaaggctgataatcattcaagtaaggatcaaagaatggagccatggggtcatccatgtcaatggaaggatccaagtaaggatttgcatcgtcccggggtggcgagggcacgaaatcgaggtagccagtgtagtaggaaggatcctcatagttggtaggaggcaatggtgaatcggggatatcatccaaagtaagctcgatgccagtgggatcgatgccagtaggatcgatgccagtcgactcatgagatgtgccctcatcaccagattcaggaagatccatgatggactcaaggatgaaaggtaatgtggtaagtaggtttcagctgatcaaagtcaatattggatgcttggtttggtttgatagaggatgaaagataatcactgttgatggagttggatggaacagtcgagtgagtggggtccaagatggactaacgaggactgtgattgaaggtgcctcgacagaaagagaggcaagactcaggtcctgagagtgtccttgtacaatgtcagagtcttgggaagcaaaagaagaagtggagtgttgcaaaggacaagaaggaatggggtgttggaaagcacaagaagaagtggactcttgggagtcctcacgaggtctgttgttttgaaaatgaatcttactttagaagtggcagtgggagtcgcgtcctgaacgcgttggcagaatctcacgagagatatcgcgagaagacacaactgtcctcagtgatgaacttgggaggtctcttgatatgaagcagatagagagaagtgttctccttcgaattggacaggagcaaggttgatcaagtgcagattgagaatgttaacagagtcagagttggtgcgaggagaaagatgagtggtgcgaaagagacaatgtaaacaattagacgagggggctaatcgacgtattaagcacaacctcgacgtattaagtgcaaacagcaggactctgtttgagtgattgggccacctgaggtgtctgattcaatcgatggtgtgcctcttgtttcctagccaactagaccactagcacaggggaaagatatcttctagttctgtccattgtgtcaatcttaagagagatgaggtcgtctcgaagttcagcaccagagaactattcatgccatcaggagcattcgatgtaaatgatcaaccaatggtcactttcctaattaggcttatagaggctctgatcagccctatagcttctagcttccctagaagttactacagttactttactagtaagctgtctagcaagtctccgtgtctatcgccgtgtcgaaggtgttggtagttgaagaacagggtaaacattgaatttatattccccgtcaacctcttagtgtgacgtccaagtagcctacctcgacatgctcgatctttatatatatctcgactttatagtggatacactataccatattgacctatcatatttgatacttcgatttgattggatcactttgctctgaagatcggattgatattcataccttgctaatactaagaccattaacttagtgctttagggtgacacagggatattcaccaagtcagtgatgcctttgtctagagccatgcaataatgtctcccatagctctaggactattctacttctgagtcatatctagtaatgacccccattatacagctgttcagccttggcgcttaatatcaacagcggattcgccagggtttagggctaaagaaaaagtaaaacagattgcaagacagttaggcctccaaactgggcagttgaataataagtacaccgtatattgacaagaatagaccgacagaaattcgtggggccgactgattggcttcagggctgcaggctgcacagcctgcgcatcgtgatgcgtcgtgatgcgtcgtgatgcgttcctttcacataaaatgcgtctcacccacagcgccattctctttcttctctgcatttttgtctttctcttttcttcttcgtttttccgtatttttgctatttaatccatctattttccctttatattgtccaacttgggttaaatctccaactctccaactctctatctccaactccccggcttacggcccacagctcacagcttccagcttccagcctaccggactgggctgtcatggatacatcttctaccccagctgaggccaaagatgaagttgttccatcagagaacgtgaacggctctgcccagtctacagaaaccaaagaagtcaaagacgctgctgccgcccccgcacccgagacagcccctgcgtccacccccaaagtgtgcaaaaataaaaaacacaaaaagaagaataagcaaaaggaagagagtgacagctcctctgagtcttcttcttcgtctgaatccgacagcgatgccgattctgaatccgactccactgagagcgacgccgataccgagaagcgcaagcggcatcgactacgaaaggcgcgtgcgcgacgtgcgaccaaggataagaaacgtcgcaagaagaagaagcaacaacggtcgcgcaaggctgaggcatcggattcggaatctgactcttcctcggaggcagactcggagtcttctacggactccgatgatgagatagatgacaaggcgttgcgaaaattggtcgccaagctcaagcttagcaaaaagcgagctaagaagctgcgggaactggcttctgaagagttagccgcgagcgattctgtgggcgaagctcgccgcgagaagcggtctaagaagaagaagcccgcttccaaggtggcctacaagcgtgtagatcaatgtgagtttctcttcttctttcttcgtcttgcttgtctctcatgcttggaattttcgttgctgacttgttacagtatgggacaacaccatttaccagtacaagctcactgaaactgtggatgaccccgatgccgacgagtgggaccagtatattttcaacatccgtcgcaagttcaactgggagaacaagtatctcgagactgtcgtcgatatcaaaagcaaaccccttcgcgatgccctttccaagatcatggatggtgtcaagggcgtcagtcttgtgcaggagcccgccgtcgtcgatcccaacatgttgttcctgtatctggaagaaacaaggcagtacatgaagagcttgaagaagcagtcgcgcagcgagaagaagaagaaaaccagaaaagctgccgccgtcaaagctgcgcatctgaaggttctcgtcaaatacctcgacaccgactacgcagacatcaagaagaccctatacccactgctcgaggccaacacgatcaccttcgatctgctgtgggccctgtacaagcccaacaccatcgcttacaccccgacctacggcagcacagatgagccacgtgctttcaaaatcgagtacgctgtcaaagagtcctctttcgtgaagggtcagtggtacagtgtcgatggtcgttacctcgagtacgacggcaaggactacggcttcggcactatgtccgctgaagtcgacgccttcaaaggcgcccgcaagatcaccagtctcagctgctatccactgaagtaccaccgcgacgctgaggctctgcgtgcccgtctcgtcgaacgcggcaaacgcttcgtctccctccgtggcatgaactaccgcttccacaaaggcatggccttttacaagaaaaagcgctctctcatcatcaaggtcaatatcaatggccgtgtcatgatcgacccggctatccaccgtcgcatcaaccctaactataccatctccactgtccgtcccaaagatccggatctaatagatcctaaagaacttggagtcagcgacgacgagggtgattatagcgacggctgctgctgtggcggatcagactcggactctgagcatggcggtaactctgatgctccacggatgatgtacaaggtcgttgaggataaagatggatgtgcacgtgtcgttgaggtcgaagtcgacgagaacggcactgaggtccagaaggagaagatggaccgcattgaaggtgccacagataccaaggagcgcgagttcaccgaagaggagcttcttattgcctctcctgtggttctgggcttcgcctttagcgagaagctctggcttgaattcaccatctccggtatcagcgatatcgagtgggataaggaagccttcggctcgcttgtcctcccgtcgaaccaaaaatccatcgtcaaggccctcgtcgagtcgcatgccttccacgccgcgcagaacatcgacgacgtcatccagggcaagggcaagggtctcgttgccgtgctgcatggtccgcccggcacgggtaagaccctgacggcagagggcatcgccgagctactccgtcgcccgctgtatatggtcagcgccggcgaactgggtactgacccgcggacgcttgaggcggagctgaacaagatcctggatatcgcgcactcctggggcgcggtgctcctcctcgacgaggcagatgttttcctcgagaagcgcacgatccacgatatccaccgcaatgcccttgtcagcatcttcctccgtctgctagagtacttccagggcattctgttcttgaccaccaaccgcgtcgagacctttgacgatgccttccagtcgcgcatccatgtcgccttgcgctatggcgatctaactgtcaaggcgaagaggagtatctggaagatgttcatagagcgggtccgcgctatcgagggcgtgcatattgcttctttctccgaagaggactacgacatgctttccaggcacacgctgaatgggcgacaggtatgttttactgttctatttcttctctctatacaaatacaaactaaccaaactattccatcagattaaaaactccgtccgcaccgcacaagccctggccgtcaacgagcaagcgcctctctccatggatcatatcaagagtgtgctcgaagtggccgagacattcgatcaagacctgcgcggcggaacgggatacctagacgccatgcggagctatacttgatttgatttgattatttccgaatatcttgggcaatttggatgcttactatgaatatcgttgcggatctagtattcagctcgctggttgcttttgcttttgttgcttttcgtatctgcttgctggtttcggttcatctcgggtacagagtattcaggtacgacgtcgcttcttctggcatggacatggggcgaatgagtttaggtagcttgaatacaacatcggtcaaaaatgggtttcggtacaagtcgggatcgtaggatacaccgatctatagattataatggattatcaatctagtgaagaacgttgtcatacactttcattattacaaaaacaaaagtcacgacgggacatggctagtggtacatggaatttttcaagggttagccttgacgaagtcaacacccttcttgatgttcttcttcaagtcaaccagggaggcatcgaggagaccctgctcgtactcgttgaccttgccaacggggaggatctgctcaacaccgttggggccgagctcaacgcgggaagcgaagaagtcaacaccctggtccttgtacagaggggagtcgacgaaggtgggctcgatgacacccttctcgccctgagcggcgcggaggagagactcggcgaagcgggcaccggccatggccatggagagggtggcggaaccggcaccgtccttagcctggacaacctcgtcaccaccgaactggatgcgcttgacaagggcgtcgcggacctcgccggagatggaggggtggctagactgcgaaagcagggggacgatggtcacaccggagtggccaccaacgacggtgacggcctcattggcggggttggtcttctcgacctgggagatgaagcgcgaagaacggacgacatcaagggtggtgataccgaacagacgcttggggtcgtagacgttgcgggccttgtagacctcggcaacgatggggacggtggagttgaccttgtgaatgacgcgtggttagtggggcctcgaattgtggagcgataattgcgacttacggggttggcgatgacaaggaccagggccttgggggcggcctcagcggcggccttggcgaggtcgcggacaatggaggcgttggtgttgaagagatcatcacgggtcatgccgggcttgcggggaacaccagcggggatgaggatgatctcggatccctcgaggcagtccttgagaccggtaccctcgggcttgtagccggtaacagtgctgttggtgttgatgtggctcaaatcagcagcgacacctaaataaagtcagtaattgcttttgctgaacgaattggatcattcataccgggagcaccgcggatatcgtagagagcgagctgggaaacacgggggttgagcttcagcagcagcgagagaggctggccaataccaccggcagcgccgagaacggcgaccttggaggcctgcgcgaagagttaggtttaattctggggaagacagatgaatagaaacgcacattgaaagcggaggccgagaaggcacgcttctggaagaggttgacagtacgacgagcagcaaacatgatggatgattgagggatgtggatgtgagaagggaagaagttgagggaaggaggagattccggtgaaagagatgggattggcttggctccacaacaggttccgagctcccgatggctcggctgagctctgcttctcttacttcgactaatctgctattttgggatttcctaacagcaattgtgacgttctggggtttattattggctagctgggcttaaaatctctctaggatcaaaataatacctcatttccatgctaaaaggcttatgtcccattctcggagcaatggatgtcagctctgcatgtggtaatcgcatcatcctgtcaagcgaggtaattaatttcgtgtgcttaacgtaggaagaattgtttccaatcgatatatttagcttagagatatatatccagtgagtcttaaggagctacaatgccttagaaccctagagaagagactagcctatagttagttgtatagttatgcaattgaaggtccaggtgtccacgggtgagtggtatactgtcacgacgtcataggcccagaagttcccgttcgacccaatgcggaagtacactgaaataatcaataccttgtgtactagaaggaatataatggattactttactaaatagcaagtcctataggtataatcgcatactcggaaatagctggtgatggtccatagtgaagttgaacctagcgcaacctactccgtagcatatatatacattacaacccacactccgaaacataactaacacttgtcggcaacaaggacctcaattacaaagaccaaacgccggcgctaatgaacccaataagcccaatacaagatacaagatcatgtcctacccaggtaaaccccgagaaccttcgccagctcccaactatacccagacagagaccaagactacatagtgatataaccctaccgcaagaagtgtagcactgcccagcagaacaaaaagaaaattaccacaccaccccagaaaatccacttatcctggcgcgcccgccgctccaccatccggatcgtatcgccgctaacaccaagcgtgttcgcaacgctgtatagtcgccgctgagttcccttgagtacttcgcgctgctgtcctagatcagcgaggaccgctcttccgcggtctaggaaatcatcgagttgattgtgtgtgttggagaagaaggactgctcgcgtagcgcgtgggtttcgcggtcgtagtcggcggggccagcgccaaagccgagaccggatgatgagggtgcgaaggctgaggtgctctgcgggagtgaagattgcgcataagggttctctggtgttgcggcgtggtgtggacgacggcctagaagttcattgtggttggtgaccgattgctggtatgaggtcagtattggagtatctcatgacaggattgatgtatacatactgcatcttcgcgttctttgcggagtcgatcgaattgtacccgatagtccgcgagctcacttcggaagttcttgacgcggtcgaacgccttttgttgtttctccggaattagttccttcttggagagtgcggagtagtcatcgacggtgcgggaaagcgatgccaaggaagcagcaagctggcctagaagctagaagtcaatatcttaggttgcgaagagtcggtggtaggagcgcaccttgtagcgcgggtgaggaggtggttggcgactgtgaaaatgtatccagatcacggcggatcgacgatgattgctttaaagcagagttgaatagcgagttctgttcatgttagctgtgtaaacctatcgcgaggaactgcaatatacataccatgttgtcaatgcgccgtatagattagacttttagattgcttcaatacccagtaagtcgtggaaagaggagtattaggactgctagtaagctaattaagagatgataagctcccgagctcaaacaccaaggtcatcatctgatcccaccggaggccagatggtcttgtttgggcccattctgacgtggttcaccgccttcaggtacaatacattgggatatttttagatgcataaaccaggcgatctttgaatcacaacgtacttgattgaggaagatgtcgccaagttatgattgggtttaatgacttgaccggcacctaagggggagattgcgttttatctcctttattcccaaattcgaggatttctatcagctaagttgttgaggtttaaattgaagaagtcttgcaaaggtcaccataacgcctcgttttagatttccaagcagggggataacaagtcccaactgtagagaaatagaaacaaatttggcaaaaagaatcgggtagagatcgctggctcgagcctataccttctccgcaatatcttccatatcgttttcagtgagaacaaaatcagcctccctgccctttttatcgcgaagaaagatgtcgtggaatggtagcgttaactgtcccatgactccaggagagtttggccctgggttccgttcaatctcactcttttgtgcgctgctgagaaccgaaggtccatgctgctaccaggcagtaggtttgttgcccacggttcgacagtaattcggcctcgactaagaatgtgaattgtaatcgcggtcttaatttgaccgttagagtctttgaaccaaaattcgatggctgaggctttaacacgtttgagagcacgcgactttgccgacaaatgttggctacttggcggatcttccagctggcggaaagtatggcgtccaggtaatatctgctctcctagttattgccccactgcggacaattcttgtattggaaggcattaagggttttatctcttaacacctccagctactgtggcacactgtgccatagtatccattatctagttatggatcacatggtcgattagtcatcctacactggaatcccccaccactaggtagactctgcgagtagctcaacttcgaatatctacacgtcgtacttgctaggaagacactacattttgtcatattctacaactgctagaacttgaaaggaaaatgatatcgttgttaaggtactggtacagtcaatccgatccgactcctttcgccaaatgagaatgcaagaccacagaagagctgggatggtatatcaagataaaagcaattaggcaacaccaaaaagacgaacgccatacatctatttgggagggaacttgttctgcaagaaccatctagaccatagattagcatcatgccacacccatcagtccgaaaatatatgctgtacttacttgctgacgaagtagtccacggtaccaaagattccaacagcaccggcagagagaccaaccagctcccaggagaggttgccgcgcgcgtgttgcttgtaggcaccgaagccgaggcctgcaccgaccagggttgcgatagcggcattggcaatgaagacagggttgctggtgtttccacagaggctactgctcttcaccttgtgggtcttggccttcttcttttcctcgtcctcgcgcttcttctcatcggcttcccgctctatccgctccgcctgggtggtggtttgaacatcttgctcaaggaagtcggactccacagtctgcacatgggggctatcaacgtcgatcaacgaagctgtgctctcggattcatcgtggtagactccgcccaccgggggagcacggctggagtatatgttagttttgtgcatggagaattgatatcgtgaataacttacgcctgttatttgttagcactgtaatttttgaagtttttgaatttagatatgagtttgaatacttacatcttcgggggactgcttggggcccttggcggctgcgtcggcgtaagacatgatgttgttcgtgatggtaggtaatggttctgtggaaattctagtcaacaactaaaacacctcaaggtctagaacgaaaatgtaaacttactggaaaacgtgatatgggaagggaggagtccgagggggaaaggaaggatttatacccaggaagctggggggtgatgacatcacgtcattgacctgggcccactaccaaggttccgtgggctgttgatctcataatagctatacactagtagtactagcagtacacaaatgaacctgaagataatttacgtccactcttctaatgaaggcttaattcaaataataactcgattagatattacggtcattagaatcttgacttgacctcggaaggcgttatcaggcacaacaacttcaccaaaacacaaagatgatgcagaagaagtcgagaaaaatttcattgggagaatttaaagctgctaaagagatcaaagacaaatgggacctatgtaatggtctaatgagggaggcaaggtgttttaatacagattacatataagtcagaacaagagagcttcgctgtctacagaagaagctccagagggttctcgacgaccttcttcagctccttgatccattcaccaccaacggcgccgtcaaccaccttgtggtcgaagctaccggtcacgacgatctggtcgtcccactcggtaacggtgccctcctcggtctcgacggggatagcgaccttgcgggtggtgccaacagccaggataccggcctgtggggggttgatgactgcggtgaagcgctcgacagcggggttcatgcccatgttggagatggtgaaagtgccgccctggtactcctcgggcttgagcttgttatcgcgggcacgcttgccaagatccttgatctgcttggagatgctggagagtccgagaccctgaacgttcttgacaacgggggtaatcaaaccagagggggtagacacagcgacgctgatgtcaacggtgttgtgctgacggatgatggcctggccgttctcctcgcgccagctggagttaacctgcgggaccttcagaagggcagcagcgcatgccttgaccaagaagtcgttgacagaaagcttgtactgaccctcagcggaagcgttcagagcctggcgaagcttcaggagcttagtaacggagagagtggtggagacgaagtagtgagggttctcggccacggactgcttcagacggttggcaatggtcttgcgcatcgagctgacggggatatcctcgaaggaggcctcgctggaagcactagtggtgctgggcttggccttctcaacatcctccttggtgatgacaccaccacgaccggtacccttaaggcccttgatggatatgcccttctcgagggccaaggccttagcggcagggctgagagagggctcacgatcaatgctgggctggagcttctcatctgaagtctcgggctctagtgcggcgggtgcctcctgagctggggacggggctgagggctcagcgctcttgggctgctccttgtgctgctcaccgagatcaggcttgtcaccaccggcatcggctgtggtaaaagactcgaaggcggagatgtcggcaccctcctcaacaaggacggcaataggctatagggaagacaagttagattgatgaaacgaccctcagagaaactgggtaatttcttaccgagccaacagcgacatccttctcgccgctctccttcaggaccttggctaggataccctcatcctggaactcaaaatccatctgtgccttgtctgtttcaatctctaccaggacatcaccgggctggagggcatctccggccttcttctgccacacgccgatgtttccagcggtcattgttggcgaaagtgccggcatggtgatgattgtgtggggagggaaagctatagacagacatattagaattggtgtgttggagaaagagataagtcaattgtcatacacttggaggcatagaagcgggaaaggccagagagcgcaggcacttgggtcctggtggaaacatcattagtatcaacccacaatcataattattaattagtggaacataccgaatcgcctcctggagcttggaggagacctggggccggcgcatagcaacggcacctctggacatgaacatggcgcccggggtgcgcatccgaatagctgacgcaaccatggtgcctgagacttgttgcgattataaaaagaaaggattaaaggcccttgacgctgatatgaagaaattgaaagagcccggtacagagaaacgtgaagggccaagaatggatgaggttggggtagaaggagatgcctctaaatcacgaacttttctgttgagctacctatggctcccggtgagaggagcggcagcggcctcttccgatatagtcacgtgctgtaatttacagtctcaagctctggctatgtacataatattctgccagcaatatagctctacgccagttataattgattataaacaagcggtaaacccctctcagaaggcggtataaacaagggtcaacacttttgcttagtcaccgtattggttatccacggattgtttttttgggggccaatgcctttcctaccgcattaggtatacacctatgttgtaagaagaatgttggaaaacattcaaaagcatgtgagatcgaggaattaccaagctggaggtagttcttgtgatagttatcatttttactagcaatatagatgtactatcgtacagggtacatgcctatgtagtacagtacttagttacatacatatagtgtttaccccgtactccgtacagaaccagacgatcaacattctgccaggcaaaaaaggccggtgaggacctttggaatctccggctccagccaatccttagatgaggtaagcatgcattagtcccgattcggagaagacacgcagcccccgtccttacatggtcatcgcaattgtttcaagcttcgccacgtttactcgttcgatgtttttgatctaattagatcactccgcccggagtcaccctgactatggcggacaccgaagtcggctcagagccgacccaatccattgcaatgcctgagaaatccgtcgagacccccgacacatcttctacagtaccaaactccgacgagccaacactgcccgagcagaccgaatcggaagaaccaaaccaggagagcgacgagggagtagccgaggtccaggaagatgaagaaaaatcagaggtcccgtctaagcacgagcctgaacaaactgaacaagaaccgcaaacagacggtccgcctacgatccaggaacccccccacgaggacaacactgcgacagaaagcagatggcgatcggattcgcggtcaacaacggctacgtttatgacgcagcgatctagcccagtcagctcgacggtctttattgtgacggctctggacaatatcgctgcttcgcgggacgcccggagggacaaaaagctggaggatgccacacaggtggccctggccaatatcagacaacctgatgggcaagccattgatccggagcttatcttccgtcctctacacctggcaagcaaagccctgagcattcctctacaagtgactgcattggactgcattggaaagctgatcacatactcctatttcgcgtttccatctgccgcgacagacaacaatgccacgcgcgaacaacctcctcttattgagcgtgctattgatgcgatctgcgaatgcttcgagaatgaagcaacggccgttgagatccaacagcagatcatcaaatcgctattggcagcggtcttgaacgacaagatcgtggtgcatggagctggtctcctgaaagccgtccgccaaatctataacatctttatctactccaaatccagtcaaaaccagcagatcgctcaggggtcgctcacacaaatggtcagcacggtctttgatcgcgtgcggacacggatggatcttaaagagctccgagtgcgagagctagaaaatccatcctcgacccttgatacatcggcgagtgacgtgggccaaaactcggagacggctgatcagcccgtcattaaagagcccactgctgagaagctcaccctacagagttttgagtcgcctaacgaggttaccactgtcaacgataatgcgccgactacagtcacgcgtgctaagcggtcaacgacgaggtcaatgtcgggtatccccgaggaaaaagatgatgatagctcggccgaggacgatgtggacgagatttacgtcaaggatgcttttttggtcttccgagcgctctgcaaattgagccacaaggttctgactcacgagcagcaacaagatgtcaaatcccagaacatgaggtcgaagctactttcactgcacttgattcactacctcatcaacaaccacaccgcaacctttctatcccctctggcagcaatcaagaacagctcatccagcgtggatggaatgaatctcctgctagctgtacgacctcatttgtgtctaagtttaagtcgcaatggttctagcgctgtgcctcatgtcttcaaagtctgttgtgaaatcttctggctgatgttgaaggacatgagagtcatgatgaaaaaggaactcgaggtgttcttgaaagaaatttatctcgccattctcgagaagcgcggggctcctacgttccaaaagcagtacttcatggagattctggagaggctaggtggtgatccacgggctctggttgaaatctatctcaactacgactgtgacagaaccgctttggagaatatattccaaaagtatgctctactcaattcttgattttctttggcatggactaaccttcttagtatcattgagcaattgtcccggtactcaagcgtgccggttgtaacaacaccttcacagcagcatcagtaccaagaacaacacactaaaatgtcagccattggttctgaatggcaccatcgaggaaatcttcctccttccttgacaagtgcacacattgcccctactccgccgtcctcgatgcctcatattccaccggagtacggattgaaacagcagggtttggagtgtcttgtggagatactgcgctcactggacaactgggccacacatcgcatcgatgaactgcccgaggcagccattccctctaaatcgatagataactcccgtgagtccttggacacaagcgtgcttgtttcaccgcatctggagtccttcgagagtgggactggccggtccacacctatgcccgaagacgacccaaaccagattgaaaaagtcaagcaacgaaaaatcgctctcacaaatgccgtccaacaatttaatttcaagcccaagcgtggcatcaaggccttcctgaaagaaggtttcatcaaatccgagtctcccgaagaaattgccagcttcctacttcgcacagaccgtattgacaaggccatgctgggagagtatcttggtgagggagaccagcaaaacattgctatcatgcatgcttttgttgatttgatggaattcacgaagcgacgcttcgttgaatccctgcgctcgtttttgcagcatttccgcctccctggtgaagcccaaaagatcgatcggtttatgctgaagtttgccgaacggtatacaactcaaaaccccaatgccttcgctaacgctgacactgcatatgtgcttgcgtactcggtgattctcctcaacacagatcaacacagttcgaaaatgaagggccgccgtatgaccaaggaggactttatcaagaacaaccgcgggatcaatgacaaccaggatctaccggccgaatatcttgggaccatttatgaggagattggaagtaatgaaatcgtgctatacaccgagcaggaacatgccgccaacttcaaccctccacccccggctcccactggccttgcaaccagggctggacaggtgtttgcgactgttggacgagacatccagggtgagaaatacgcacaggcttctgaggaaatggcgaacaagacagaacagctctatcgttcccttattcgagcccagcgcaagacagcagttaaagatgcgctttcgcacttcattcccgcgacatcagatcgtcatgtcgggtcaatgttcaacgtcacatggatgtctttcctatctggtctgtctgcaccgatgcaagacacgtccaacctggaaaccatccggctctgcatggagggacttaaactgtccatccggattagctgtgccttcgacctagagactcctcgcgtggcctttgtgactgccttggcgaagttcactaacctcggaaacgtgagggagatgatggccaaaaatgtggaggcactgagagctttgctcgacatcgccttcaccgagggcaaccacctccagggctcgtggagggatgttttgacatgtgtcagtcaacttgatcggctccaactcttgagtgatggagtcgatgaggggtcgctgcctgatgtttcaagggcaccttcagcactttctaggacgccttcatcagcagatacctcccgcagatctacgcaaagtacacgacgccctcgccctcgctctgtgaatgggccaaccgctttccgcccagaaattgccatggagagccgttcggcagatatgattcgtggcgtggaccgtatctttaccaacactgctaatctgtcgcatgaggcaattattgacttcgttcgggccttgagcgaggtcagctggcaagaaatccaatcttccggtcacaccgattcgccccgaacctacagtctgcagaagctcgtcgagatcagctactacaacatgactcgggtcaggattgagtggtctaagatttgggatgttttgggccagcactttaatcaagttggctgccactctaataccatggttgtcttctttgccttggattcgctccggcaactttcgatgcgcttcttggagattgaggagttgcctggtttcaagttccaaaaggacttccttaagccttttgagcatgtgatggcaaacagcaccactgctgctgttaaggatatgattctgcggtgtctgatccagatgatccaggcccgtggcgacaatattcgttcgggatggaagactatgtttggtgtctttacggtcgcagcacgggaaccctatggtaagcctcgctgctcaaattaatccgtccctcgctaatgtatcaaacagagggaatcgtgaacatggcttttgaccatgtcacccaagtatacaataccagatttggcgtagtaatcacccaaggtgcctttgcagatctcatcgtatgcctgactgaattctcaaagaactccaagttccaaaagaaatcactgcaggcaattgagaccctcaggtctaccgtcaccaaaatgctacggactccagaatgtcccttgtcacaccgtggtgcttcggcggccatcttccaggacaatggaaccaatcttgctaaacaacttacccgtcaatcacaagaggagcagttctggtatccgattctcatcgcattccaggatgtactcatgacgggggatgatctcgaggtccgctcacgggcactcacatacctctttgatacgctaatccgtcatggtggcgatttccccagggacttttgggatgtcctttggagacagctcctctacccgatctttgttgtcctgcagtctaagtccgaaatgtccaaggttccgaaccacgaggatctttcagtctggctgtccacgacaatgatccaggcgctacggaacatgatcactttgttcacgcactatttcgatgcactggagtacatgctgagccgcttcttggaactgctgatattatgcatttgtcaagaaaatgacacgattgcacgaattggcagcaattgcctgcaacagctgattttgcagaatgttgcaaagttcaagccggagcactggtcccagattgttggggcattcgtggagcttttcagcaaaacgaccgcctacgaacttttcacggctgctgcatcgatatctaagccgacagaggcagttaatggggacctcacccaatctccagatgctgctgtagcaacaaaagagatgcctgatgcattgcagcctaacggatcccaaagcgcatcttctctccatgatcctcctgtccaaagtgaagcccgcgccgaattggaagactatcgccctcactcagaccagcagcaacctgcggctgtcactgcagctcggcgccgttacttcaaccgcatcatcacgaactgcgttctccagctgctcatgattgaaacggtccacgaacttttctcgaacgaaaatgtctatgcacagattcccagtggagagctcctgcggctcatggggctgctgaaaaagagttatcagttcgcgaagaagttcaacgaggataaggacttgcgaatgcaactctggcgccagggattcatgaagcaacctcctaatctattgaagcaggagagcggtagtgcctctacctacgtgcatatcctcttccgaatgtatcacgacgagcgagaggaaagacagagcagtcgcgcagagaccgaggctgcactcattccgtaagttcattatctaatattctctccttgttcattgctaatttcactagactctgcgcggatattattcgcagtttcgttcgccttgaagaggacacccagcaccgcaacatcgtcgcttggcgtccggttgtggtcgatgtcattgatggatatactaacttcccgcaagatgactttaataagcatattgaggccttttaccctctcggagttgagcttctgagccgtgatctcaatccggagattcgcgttgccctccagtctctactgcgccggaccggcgaggtccgactaggcattgctccgcccaatcccctagacgtccccatcagcccgcgcagctccgtctcccagaaagcctcgcgccgcgatagccaggtctgacttactgcatgatttttttggatatcctcgccgcgggcttgattttcggcgttctataacccgactcttcggggtcttgtgttgtcacacgagcattttgttctactttagatgcatacctgctgctgtattgataagataaaatatttcttgacttgttttcttatttattctgtacttcctctagagttgggatcttacccggctcgtaaaaggataatacaccgtccatgtccttttcagtcatccctacaagctcatcaaggctccatgtttcgcagactccagacatcctataattattagctcacacttctttttgaagaggattgcaactcaccatttcattctcttagggccttggtcaggattcggcgcaatctcacggagcttcctccgtagctttcccacattctcaatggctgcgcccgtgttcgccggcaatgtctccgcgatcttcttgcgcacaatactggctaatttgggcccgttgccatttgtgctgaccatgatctgcaatggcccatcgcggtgaatactcccaaaatagaaatcgcattcgggcgggacatcagcgatattggcggcaattcgcctctccttgcaaagtttccagacttgtgtcgaagcctctgggtcgtcaatggcacagagcaccatgtccacattatcgaggtcggatggctcaaaatttcgatcaacgtgtgtgacttgcttttctgccaccctgaaagccacttcttcatttagtccagcggctggacaaaccacagtgactcgggcatcggcattgagaacgttgagaatgcgccctgcagcaacctagcggagatatgtagatcagtcctcatcctttaaacgatagatacttgctatcatgtttgaccacgtacctctccacctcctacgactagtacatgcttgtttttaatttgccaagcgagtatcaatgaaccaccaccttgcacttctgggaactttgacatggtgggatgtgggaataatgatgcaactgtcccgtttatcggctccgataaagaaaaaccgcgtacggtgggcggtacacaccatccccgcattattcccgagcttttcccttctgaacttttttcttctttttttttttcatcctcctttcacgtcactcgtgtctttttcttaaattatgcggggcgtccagatattttcggggaattctcacccccgtctcgcagagactatctgcgagcgcttaggcactgtgcccgccaaagctaacctaggaaaatttgccaatggcgagaccagtgtcgagatcggtacctcagttcggaaccaggatgtttacatcattcaaagtggcagcgagaagattaacgatagtgttatggagctcctgattatgatctcagcgtgcaagggtggctcagcgaagtccattacaggtatgttgccgacgcctccagatacaaaagcttaccccactaactcgtttctctagcggtcatgccgtatgctgcccgtcctgtttgattccaatcacagacaatgctgactctcaaatgagatatttcccatactcgcgccaatctaagaagaagagtcatcgtggtgctatcacggcccgcatgctcgccaatctcctcacgatcgccggcgtggaccatgtgatcaccatggacctgcacgtatgtttctatgcgatgttgagttttgtaatatggatattgatgggctcctaggcatcccagatgcaaggattcttcggaaagccagtcgacaacctctttgccgaacccttcattgcccgctggctccgcatgaatgttccctcctggaaagacgctgtggtggttagcaagaatgctggcggaaccaagcgagtcacatcgctggctgatactctgaagctcaacttcggtatcgtgacgacagatcgtcgacgcacgaaggtccccgtggccactatgactgacagcacagtcttcttcgatgccgtggatgatgatcccatctcgagcaaggacgtacagcctttcgagcttcatatgcaaggttctaacagagcacctgccacacctcccattccggaagagccggagccaatcactcctcctcctgtgccatattttctgcgcccggaaaccccacctgcggctcgccgtctatcggagctggaagcagcatacgagtacacggacgtccgtgtgcgggatgttatcaccggtcgtctggtgcagggccatttggttgatgatgattatcgtatcagcgaagaattacagtctggcggcaccacaccgggagctggcagcagtaccaatgacaacttagaggctattcctgatgctatggttaactccataatctccaacatctcgtcgcagcctcctgatcatgccctcggtggctcctttgacgcagttgagtctgacgacgaagctagtgtctgcgagggccaggtcgatgaaaggaccatcacgctggtgggtgaggtgcgcgaccgagctgtcttccttgtcgatgacatgattgacaagagcggatcgtggatcgcggctgcagagaccgtcgtcaagcgcggtggagccaacaaggtttactgtattgccacccacggtctgttcggggagaactccttagatcagatggaagcttgtcgctcaatcgaccacattgtcgtgaccaacacgttcccgatctcaccgttgatgttgcggagatcaaaaaagttgattgttattgatgtctcgagtctattggcagagagcatccggagacaccattatggcgaaaggtttgttttcaccgaccctggtgtcgtgtgaccatccactaacaactagcagcgtctcggctctcttccaccttaacgactgatgaggcatatggcagtaacgaggaaaaataacgaaaccaagcaaagagagacctagatactttctctagggcgtcgtctttgcgtactgatatgcaggttcccctgcaaccgttgatgacatgatacctatttcctatcaaatgaacgacccgttctgaacctctcccccttcctcgttcccggactgtcctccccgttgccccctaccgttcccgacctcgtaatgtgatcatatcacacccctcaaaccagcgatgcagtccactctgggttctgcaggagcatctcgttttccacaaggtgttcttaacggagcgttggcagattaaaccggatcttgttttcttacttcatgttgtgtgctcttcggagtctacagcatggagaagtcacccctttctcagttcttcggaacgattgacctcgcggttgtggaagtggtgcaagaggcgatctcgaacataatgtaattcgatagcaaacaattcacacatttttcacattgggtcattggacacgttgacattttcaaaacttcccggttgagacggtagacctctggcagtgccgaggatttgctttccagcgattcttcccgattttcttgtcatgttgacttcatttccgtcgcaccgatgcggttggccgtgattctggaagccggttggtgattcggtcgtggtctggtgatcgccgagcccagagggtgtccactacgggagtgtcggtatctacggatggtacacggctttcaataagggattgtcggtgtgcacgtttccattgatcgaccgtgggacagttggatagagcttagttctcactttccaggcattccaggccacttggcgtgatcgattagtccagggtcgattctcatctcccgagcagatcttgaacggtcatggctggcctaatttgcaatctcaggtgtgacagatggacctaagatcactcaagcattccttgcaaacccatcggaagtgcagcctttgtctgttgagaccctgcccatgtccctttgtatagttgagtacccctttaagttggtagttgcagagaggactcgaccctagaaacctaccgttgtgtcaccccaattgggctcctctcggtcgttttggtattctgtgctcatttcatgctcttgtacacttgtacaatgagaaaaagaactggaactgccccatctagtcgctggagaagatcttggctagactgtggtagaattccccaaacaaatatgtggactcacggatgtgacagagatcacaatcctatacgagagactcaacaattccattttcttttctttgtttttttaattttaattttaattttcttccagggctttgcggctattcgataagcaattgggctaaggcaggcgccaaaccggcacactaatgccgccggggggtatatccctgtcacttgatgtgatcagctcgaaggcaaatggtcgaattggatggaatcgttctgaaactgagattgaaactgaagctaaaattgaaataccaatgacaagagggaaatccatgtggatctctgttaagcgaagttgatgtatcaacagttgaagattaggactttcagggggggatctcaaggataataaggtagatatgtcaaaagggcatagtaaatacaataggaagagataataggagatcataggaagatcatactctatgatgtggattatagccaaataaccatctatgtatgctaatgtgccctaatgtactccgtatatacgctaactagaatatgcattctcgatcggaaccggattgctgggatgcaaagatccgatcgaagagaagaaaaaagaaaaaccactagacttgccaattaaccaacatagaaacctccgttgtcagttcaatccagctcgtcgggacagaacatatctcgggtctatacaattcagctccacttcggatcatagtcggagtggacgacgatactagtcatctctatcatatttattgacttccaattaggttaattcccctttattctatattctgaaaacgccacactagtcccaactcttaaaaataattcaaactaacaagtcagtcgggtctcttccgtccccccagctttctcggaatcaccctttgcatcacgattcttccaatcatgtctccccgatccctccccatctggaggatcgaaggctgcatctatttgctaaactaggatctacctcgcttcgcctaagtttctatgtaagagattccaatatatctatccatttgtatccatttggatttctctctcatatactccgtaaataaacacccttctgtctgcttatttctttacccattctattaaatttgctttttctttcctttttttctgaggaactcaattgatcccggttacatgcgtcatcggctttgtgcgtatttcggctctttagttgtcgactggttgcatctgggatcctctcaccgtgatctctggacagaagtatataatgattgatttgtcctggatttcgagtctcatcttcttcatcccttgacccatcgacctcctcttccccgctgaactctgtcggaactctgctaagcccattctcctcttactatattccattggtgttcaatccaagtgcctggaacctttctccgctttttcagtgatcgacgcagttcccagtcccccgggttgtgcttagtctgtgagtcgcagattttgacaagcaaaagggaaccacaagctaactatgacagcttctccaagtctatatcaacatggccaaccaatgttccggccacgtctttgccattgtccaggctaccaatggcaacatcttgacctggcgctgttccgactgcaattctggaccatttgtggctatttggcgttgcaaaatctgtggtcattgccgctgcaatgcttgtcacaccaataagggataggcggaatctacggtaagatccttgttacaaattctatgatttgacattcttagctccttgcaagaggcttacttccttaaagagacgtctgcatttcccttctagcatttacaggactgatctgccattgatctcccactctgcatgaaccctgtgcaagggtagttttaccaccataatccctggtgttgggttttgattcaatccactttcttcgtggctcggttggcgtgtgtttatgcattttgatgtgttccaaaaagtccccaaaagtttttgatgcactgcatcttgcatccacaggagttatacttagagcttttctcttctttttttttcttttgtttctctgttttctcttcttctggccaatttgtattctacttggattttgatttcctcagggaaagtgtgacattattttatggattttatatcatgtcgtttatactacaattatgcaacctaacacggctactctaacacctcgatggggagtgtgttgggccagtcataggatgtactttatagcacctcgtgatccctgtctatctgaatgtagggtcctggtatccccatcgtactataaaaagcagagttcagggtttcgctttcggtttcgcacctgtggaaataaaagaaatagccaatagtgtttaccataaaaatattacactaaaaagtactagggataagtacaaaagtaccctgatattcattgccccgaaaaaagagtccattgctattcgaaggaatatttttccagccattcaagagctaatgagatgtatctcttttttggcggaattacggttcagtgaatccgcgcaaaagcaaagatactatggagtagataggaacaaataggaacaaatagagtcaaaatagagagaccaagggttcccagggaggtgggacaactctattacttctccacccgcgacgggccttttgggagatttgcatttacaaaagtactgcttagggcttctatagggttgggtgtgggatgtactgaatatgtactccgtactcttcttttattgcaaagatggatataattcgcattatctttaacaatgagaacagatcgatatatgtgaaaatgaatgcagatctcctccttcggcggacttaggtgtagatactctgtcgaacaattagcaaccacgcaatcataagaataagaacaaccaatcaaacctacctctgtaatctgattgacagccaacccaggctctgccatttcagcgtcgcgcaggaactccaacggcaaccaaacaagatgacccttgatgagatccagcttctcccgcacatccttggctggcatatacggatcgaacagatgtccctccttgtgcgtgccccgaggccggaaattgtcgtagtcctcgaaagtcttgatatgatcatcagggtccgcccggaacaacatccgatacgcctcggtgttcccggtcgcttgcgacgtccaggtgttccagaccgcatcgccgagcggatcgatcacgaactcgttctccgggccctcatcgatccggttgagtgacacatcgggaggttgcgcgttcgggtcgcccgaggcgtcgaattcttgtgccggcagtaggcctaggtgctcgcgccacagttgtcggcggagcgtggcggccaatcgggaggcctggtatggctgtccgttcatgcggctgtcgatgaggtcttggtcttccattacgatggccagttcgctgtcgtgtgagccaagctgggactgtggggagtggatattagctgatgatacagaccgggaaataaaaggaatggaatgcgtcagatgtgagagggatgcggtgctggtgtgtgtaacctacccggtcgttgatgttggcgctgccgcagatgatcgtgcgatcgtcgacgatacacaccttgccgtgcacgtacagctcctcctggacaaagttcgccttttcggcctctgggtcgccctcccagacctcgttggacatcttacccccgttcaacatgctgcaatgcgatactgaatccttgctgtggaatccaccgtcgatctttccctcggcctttctcttctcgaccgtatcttggaaattctggagcttgcgcagggtttccttcttggcattttggtcggctgcgtagtccttctcgttctcgtcgccgtctttgcccaccgctgggtgtacactttcactcatgatggtctctgcgataccgcgttggatatcctggtatgtgacaccggcttgcttctcgagatcttcgaggtcaggcgttttgttgattcgatcataagcacgcagcgcgaacacgaagacgtgttctgaatgagctggttagacatgcaaccgaaaccgaacagaacagaacacttacctcttgggtcaataccctctttctcgatctgcccaaagatcgagtgctcgccgcgacaaatcgacttgtactggtagtccatgatcgcccgagtacccaacgcagcattgtcacgcaaatcaccagcgaatccaggaatcgcagggatgacaatgatcacgcggaacttgcgaccctctttgcctgcgcgcacgcaagcctcgacgatcgcacggccgatcgtgttgaagatcggacgctgttggtcgccagtggcagtgactatgaaggttagcaaagcacactgctagaagagaatgcagacatactgaagaactggttctcaatatacacatagtgctgggcattgcggatggtctcgcagtacgcgttttgaatactgtgctcgttcagaatcccgctgctccagtcgtcactgctgcgcacgatttgagcgcgcacagtgcccacgttaccacgaggcttggacgacaggggcgtcagcgggtgctggacgtattgtccgcaggggtacttgggtcgctgcacggcgatgatatcttcttcttcgcctacgagaccctccatgagtagccaatcgacatcgtggctgcgcttgtatttgtcgcgcttgatgaagttccaacgcagaacaaagtgttcggcaatgtcgtacacacagtcgccctgcaagcccatggccacgtcgtgccagggcatgcgaccaaagtcgactttgctgacttcgttgctctgccagtcttctacgctctggaagtccatgatccggttgttgttgaagtcctgtcctgggaaaatgtcgccccacaagcctgttgggtggacatcggccaatgggtgctggtttgcgtcccatcgtccgaagcatagatcaatgcctccgataaaggccacattgtaatcaatgacaaggaatttctcgtggtgcgccttgattattgttaattatgtcccaatcagtacatgtgacgcacatacccagtaaagagtcatatcagctgcgttctcaaagacattgtggtcggggtggcgcataactcggatattgccgtagccaggagctccctcggggcagaggctccgcaaggcatgtttagtgtgtgcggaattacatgtcagggcttggttaacctatagacaatcagtatatttctttttcttgattggaggaaaataccaacctctttgtagacaatgatataaatcttgacacctgcttcggcgcgtcgcttcaagatctgatccaatcgccattcctggtgctcgacagggggacggcgcaagaagagttccggagagagccaccagtcggcaatgtagatagtctcggtggctttctccagagcttcggagactgcccacatgtaatccttagcatcgacataccacttgatgcgattcccgtcgtggacgggtgcaaaagactggaagcggtgtgactctgcgatctcagcgcgcttgcgatctgtcgcttgttcgtgctcctcgtcatgacgatgattcgggtttatgatattaaaaaacttgccgactttggccttaaaatgtgtagcctcggctttgacctcgtggatatgggtgtcttaagacaaatcaggtcagtttttcttatgttataaaatgtcaatctgccgacctttgagagacccctccagatgatcaattccttgtcccaacttgtccttgaatctttgcatcattgaggcctttagtggagaaaatagttagaagagggggagggggggaagatctggagataatactggttccttaattcgtgacatcacagccctactgggtaaacatgcattgatctgatttgtctccctaccaatgccaagggaaatacagcaacgccgatcgaaatcctccacctgtgctattcttgttattgcctatttagggttgggccgcgtggtggtgtttccgcggttcctaatatcggaccactcgcttctttcttggcaaagtgtggccttagaaattggttgaattagttatgtacaacatataacaggaacaaaatgactaactacaaacagcagagatctctgactagttagttatagagtcgatcgtatagaatgtttagcggtgtatttggtggagatatatccacgatactacgtggcagcatccataagaaaaaagaaacaaagtgactagtgaattttggagataataaaagacaataaacatggaaattccttgattctgcttctcactagtctacctaggtacagtctgacaaccagtattatggctataaaagtgagaaaaaaaaaatataaatataatgtcacctaaaggctaagggagcattttaagagacatcgtagttacataagggcaatgcctctaatattatcccaagccaactacataatattaatatttactccgtaactatagttagttatagaggcgtgcggtgtacggagttaagtaactagtaggttgacccaggttggaaccaatgacgtaattggatctaaactggagccctagagttcctattcgcgccatactgtacacccactttgagattgtttatttgtattagaggtgagagggagaaaggccctacagatgctgtccaagctattattgttctagtcttctacctaggctataagtcattgttgacatggttcacgtgatatgaaccgccttggagctcaatttcaaaacaaccacatttaggactatagattatctacaacatgaaatatatttgtgatagtatcttcccccgtttccaataaaccataagtctatgttagaacgtgaatcattgctcagctcattgttcagatgttattgtttggcgggaatgctgaccgccaccacgtgactggatgggaaaaacaacgttgtcagaggaacgggccattttctgtttatcctctctcgactcacacaacgcggccagcctttcagagccccaggctcgcgattagtcgacatttttggttaatgtgctagcatcggtttggatcgtatattttgtttgccgggtgcacctacctatttttggatttataaacgttgcgaaacgagacacacgactagccatcgccctggttaccggctcctccacttactaacgcaaaggaagcaagcagatcatgatgccgccagaattaggtaagtgcaatgcaagactaaaaaaactctgctgcaggtcatttggttccccatactaacgtgtttccaagcccgagctcactcgcagggcagtgtggtgtcccagacaacacagattgccaaccaaagccggccaggtacggcagaccctgtgcgagcacgctccgaggccctctcacgggctagccgtcgtcctcggtctagaggatcaacagcgagtatccactcaagtaccacccagcaaacccaagaccagcacctcgacgggttcccgcagttcatgccatcgcaagtcggatcaggccagcacatgttcaacaatccggaggacatgctaatacggtttgggcaccagctttcacatcataacggtgcaccgctggatcaatcgatgcaagacacccacgccgggatgtctcgagccgaagactttccaaatcactcgatgcagggccacccgctttcccatcaccctatacagcccgaacttgcaaacggtttgcccaatgtacccgttccccaataccagccgatgtatgatagtggtgttgagaaccacctccctgatcacatcgtcgaggatcaagaaatctcggagctaggggctaaaaaaaaaagaggtgcgagctcgacagtagctaatgacaacgagctgcgaaagctgcttcgtcagtatgagggatggagtctcaaacaaatggcggctgaagtcatgaagaatgagggtggagggggcaaggctgagaaagtgaagcaggtcttcgcgatgatctggtaaggcacattgccgcaaattaactgcaacatttgtctaacagtatacacaggctgagagaaaattgccggaagagcagtggctccgtacgtcgtgaccgggtctattgctgctatgcagagaactgtggaacggaacgcgtctcagtactaaaccctgcatcattcggaaagttggttcgcatcatcttcccgaatgtacagacccggcgtcttggggtccgaggcgagtccaagtatcactacgtcgatttgtcggtcattgaggaaaagcaacaaaagcttgcgcctcttaacccacagattgcccatcatgcaaacggccctgcttctttgccctccagagctgccagtgcgatgcgctcgagaaggtgagatataactgacatcaatctttatttgctctcactgacaaatgactagtgctagcgtacaacaaccgactgccgatactgccgtgttcccatctcccacaacttccttcgctcctcgattcccgaataattcatcttctgccgactgcaattgccaaggccacacgccatctgggccagatgccacaatcacccgcgataatgtagcccagcaggctgggaaaatgatacatcagatgcttcagttcccgatggatgagaacaccgtcgttgataacgatacccttcaacttcccgatatccgtgcatacttacctgcaaacaccgacttgaaagttgctgcagctcttgctgccctgtatcgctcccattgcatttcggtcatcgacagctttcggtattgcaaggaacgaaatcttatgaaatatttctccgctttccatggaacattgactgttcccgttcaaaagttattgacccatcctaaccttgctccatggatcaaggaatgcgattggatgatgtaccagaagatgattgcgtttgtggcacctctcacaacccaggtggtccctaagccagtcctagacgcttttaactccatctcacaacggctttgcgggcacatcgctgaaacctttaagacccaaccaacccatgtctccttagcacgcttgattcccgcgcatatcttctgcaatctcctcaagcatatgcttgatgtgaaccaggctgccaatgccgctgctgcctggctttgccacccggataaccgaaaccaaatgtggacggactttaagactatggtaaatcctagagatatgatgaccaaggcaaacatcccaacgtgtgcggagctagcgacggagcaaattctcaagcatgacgttcgtgcgctcttgactccattgaatgatgccgacccctcggcaagcttgcttttcttcacgcaaccagatagccccgattctgttgaggcgcacaagttccctgtagaaagtgctccgggagacgagtacaacttccccgacaaatgggttcagttcatcctcaacatccccgctgccttttccaaccaccgcacacagtgtgtcattgaaaaagttgatgccttgtgggatagcgtgttgcaccggcttaccctggccggagcaccaagttttagcgcgtggtggatgacaaaagtcttcttccacgagatgatggtctggcaagcagagaagggtgggttcatgtgcaacactcctggatcactgcaaagtgcgacgtttggccctgaaccactcggccattttcagatgagacaagcgtctgttcccgaggcatccccttttgagaacgattcaaaacctcacccaagtcctcctatggctcacagtggtcatcaaagccagcctcccagtcagcactcggatttcaaacaccctcccagcgagaagcgactctctcttcaagagggcttccaaggacataacaatgacgacagcgcaattgaccttgaggatgatactatgctgctagcagttggtaaatacggtgatatgatggtgtccgatcccgcagatgccgaaggcgatgtcgtcgtcgtctagtaatttttgatttctgttcatgagttggagttggatatcccttgattctagaggcttctctattggttgtggatggcgtttccacgattttcctttgttccttttttcatctcctttgtttgcatgaagcgacgagacatgagcaatgaggctctccagtcttccttgcaagccggcacgccggatgctttctttgatcaacctacagcatttaattggcgtggcggaaaccaggaccaacttggttcttgcttctcctattcctgtttgtttactttcgggtctcatgttgggtccctctgtacatattacttgtggacgtaccttgatcatggtgcagtactctaatgtgcatgaataactgttgacacactttccgtatgacctttaacttgattccatatcttctgacttggcaagacataattgggaagatatcctcagattgataatgccattggctcctaagtccgctgttgttctttaaccttctttgcccaaccaaagaactagcttttatgaacccatgtgagactagttatcaatgacattcatagctgtattctagagaacggcacagaatctagagagcagtacaaaatcagagaacaacaggtctctggacatgcatagaaacctcgaagtcctctctctgtacagtctatacttttcaccatctacgtatagcattcatacattttataccatcgatacaagaaacaaacattcaaagagcaatgacgccaacaacaccaaagacaaagatagacattgttaacacgtcatgaaatcagagtgtagtagtaatcgaaaaaaaataaaaaacttcgctccttccggttgttcaatcccaagacgttcgtttggctttaactacgtagtcacactacgtagtgagtgagtgcacttcgaccggggaatttacaattgaagtaggtattttagagtaaataaatgcttcgcctgggttccggggaatattgttcgtttagagttgtagtgtagtgtagcgatcatgacattttggtcgtgaaagtatatatccgaaaacggagtacaacgtacgtagttacatgtagttgagcataagcgtagggtttagtgtgaggttcgcagtagatagttaccccactgctatacattaggtacattgtagatcaattgctttatgcgccccggacttcatcgtggagggagtcattgacgatgtatccgcacctttctgcaatatagctctattttcactgctttaagatctcaattttgatttcgtgctctgctcactatttacagtttagctacgtaggcagataacctcgaacgatcttgtagaatgctggaattggagtcaatagaagcttaaatcaattctttttaaacgtgcagccgctagcccagatcaggttagggtttattagtttagatatcgaaaagatcaaagaagcaagggtgatatttgcaggaagatagcaaaaaaaatttgacatatgatcaagtacagttgttcgcgtagataagatggatatataaacaagtacatgaagaagaatcgcttctactccggacgacaaataagtcgggggctcacgagacaggctgtgagattgactgccggaccaaatgaccaacacgaggcttcacgatggacccggcgaagctgtgctcggctcgcccccgactcccaggctcgggactaccaatactggctgacggcagtgtcgtaaacgcagagtgcccatcccaagcagacacttggtagatgaggcatgcaagtattaagatagatgaaatgtaaatcaagattcgcgcccaagtcggttcatgagaatgcttaggttttgtcttccttgggctcctctttgggctcttctttaggaggctcttctttcgcctcgtctttggcttttggggagaatctccatcggtcccagttctccagcacccaccagttggtgacgtaggctgcatggtagagccagttcatgatttcttcatcctcatactcgtcctggaccgcggacgcgagatcggcaaggctgaagcgctcgatcgggctcagctcgttcgggtccttggacacatcagtgaagcgccattccacgtcgttgactagcggaatcactaggcggaactcgggacgggcggccgaccgaacagagagccatgaaccaccagtgttcatgactgtgaagtgccaggcttcgcgtccgtcctgcttgacgacctgcggtcggatcatggattgaccttcgtacagcgagcgaatgtcgcgtgcggcacgcgtgctgtcctggctgagggatgccgactcgatcaacaagtcgatgatggtggggacgatctgggtgctgatgactggggtgtcgatctggacgggaggaaggagcgggtgtgcaatcacgatcggcaccttgaagctgccgacgtgggggttgtcatagggagtgataccgccgtcgttggggagggaaaggccgtgatcgccagccatgacgaacaaggtctcattagcgactcccttctcctccaggatatcgatgagctccgagagccaatcatcgacataaccgacggagttcaggtatcgattcatatcgccgttcgcaccggatttggcgcccatcatatcttcaaaggcgtcgttcggaattccccaaggatgatgggtggtactcgtgaggtgggtgaggaagagacgctggtggtcacgttccgcatcatcaatagcatcacggatgtactctcgaagctcagtttccggatagccatagtagttcacctcggcacttttaaccgggaaatgcttggcatcgggcttgatgatcgtctcttttgtctgtttatcgcggaatcccaagtgcggagtcaacttgaactgattgtcgtacatttcggtgaccgacatcataaaggtcgaatgccacggccacttggtgaagtcgtcggtctcactgttgatatccggttgctgactcaacgtgtcgaagacctggggcagacatggctggtagatatggtgttcgaattcgcggttgaaatcggcgaccagtggggtcacaccacagaaacttcccgtcaaactcttgagagtataggtggaggaagtgatggcatccttggcactgataccaccatacgccttgcggccgaaacgggtatcgtcgtgctcaaagccggtggggaagttggtcaagaactcggcagtccgggtgaggttggcaaggcgttccacaacctcttggggaatggtcttgttcttccaggtttccgcaatgcgtttgtacatgaagctgtccttttgcagagggaagatatcggcacgtgcactctcgagtttcaagaatacgacatgcttgatcttcacatcgccgctggctagtgcgttgtgaatctcctgcagcaccggcttgtcgaggttggagatgtgcaatgggtccccatgcgggtcgtagtgcagcgccaaggggtcggattgatcccagtcctcgaaaccttcgagcggttccttggacatccaggtccattgaggtgcggggcccaatgcagtgatcctatccagatactcaaagcgggagggtgtgccagcggtatcgacgggggattgacgctccgcaccctcaatgatggtggtcaaaggcaaggtggtggacatgtacatatagaccgggtcccacggtcgcataaagcggagtaagaggaagagactgaacaatcccaggacgagggcccgttgaggtacaccgtcggtgactcgcttggaggcggggagacggttgggtaggcgagcggtgttcaacagatgatccccttcttcgttatcgctgagatcatcgttgtcatccatggcgatttgttcgtagattcgaggatcgggcaggtcggcgactgacgatttagatcggggccagaagcgctgcaccaggggctccacgtgtgggcgcagacgaccaaacagccaccgaacgggccaggcccagacatgcaggatgccgcccgagatggcatggatggaatgggcagcgaacaatgagattgtgaggaggatggcctcgacgatcagaaatccggtcagaccggtcaggagggtgtgaatggcagcggcatcaccattgaaggatttggcttggcgccagtggatctcggcacctgtgaaaacgtagaaggaggtattggcggcggccatgaaggagacgatgagactgcatattgttagtgacgagattaattaattgtattcagatcaagtctaaatctattgaaaaagacccgaaagaatgtagcaatgcagtggaaaaaggggcacgtggacacttacctagacgggataaccaagatagcgagcagagcggctcccggtcgccacgcgaccttctgggccagaatgcgaaacagcaatagcagcatcacatcctggaaaaagaaggtgagaccccataggaatagtcgcggcaggggtagagaatatatatgagcgtagagatggagcaatttggcactgaataacgagagaacggccagggtgaaaaagtagcgacgggcaaagtcccagacggcatccagggtctcaccaggcgagagacgaacacgccggatgccgtggcttaaataagcatgaacagcgtgaacgactttcatggtcatatgaatgaatgaaatgtgtatatatatacttcacacccccgacatttaagaaaagaaaagaagaagaagtcggaagtaagaagtaagggagaaggaagccaagggtcttgacaagccgagtgcccaggtgggatttagtggagacgatgactgggaccattttaggtacgacatacgagagacgtgagacgtgattatatttgggggttaataggtgattatggtgttaatcatgagctacgatggattaaatgtgtattagacacgtatcctcctccgcttgactcttctatatcccatcttaatacctatattctgtcaattaccctccgcttcccccccccaaggcccccccaagccccgaaagccccgaaaagccaagacaaatgaggccccgctctccggaattgaaataaaaaaataaaaaatccggtttctcctcctttttcctcctcggggcttattgtgttcatcatggtagggagcttattcggttggattgcgctccttttcgagccattagcctttcaggttcctctgatcgaacctcaacccagactcaaagcagagaatggtatagccgttccagcagagggcccctggcaggagatcatcaccggccattatgcggttccccccgtattgaaaatccatgaccgaaacagtgtggtcaaatggagctggcaacgagaagatgtcacccaacccctgcctcctttgattcatagcggcttatatagcgggttcaacgatgcgaccgatatgaaatggatgcggggtgggagaagcatcgctgccgtctacagtgccctcgtcgtggtcatcaaccacacccccgaccaaccctccaccgataagaaaatcaccttcgcccttaaccgagcaaacgatgtcctacacaatgcccatactatcgagcccctgcccggtgaccgtctcgccgtgggaaccaccggacagcgaccctgggatggcattttggtctacaacatgagctcggacctccccctcgtcgacgaaccgcccgtattgcaaaagatcgaaggtctgcgcgcgatccacgccatgatctgggatgagcaggggcagatgctgtgggcgaccggcaccgacgccgccgccgatggctccgaccccgttccggcttacggtgtcattcagggataccccttcgatgccgagacgggcctactcagcatcgacgaagcctatcgattccgattccccgagtactgggatatcgacgtcgaatggggccatggatacagctggtgggccgggccccatgacctcgtccctgttcccaacgaacgggtattcctcgtctccaacgatatcggtctccatgccttcgatatcgataagatggaattcaccgccgcatacgacgaggtcgtcgagaaatatatgcccggcttcgaggtcaccaccaacgaccggcacggcatcaatcgccagggcgaatacgtcgagttgccgcagtcggacctcaaggggttcagtctcgctcccgatggaagcttcatatacacccagtctctatggcgactataccgggggaattataccagtctcgtggtggatggtgtgcgtacccagatcatgaaagggaatgaaatctatcggtcgcgatggttcggcgacatcgatggctggcccaaaccgaagacttagtgttttaacctgtatagcacgcctatgggctccacatataaatctgatataatgaacgttctagctatgactttgcctgtcatttacaatgccttgttgacttacaacatcctcgcctccccatctctctacatccctatttcgttagaatagacttcccaaccccggaagaggcgttgattactttcccattgtgccaccataagcaaataccgtcgacatcggatatccaattccatgtactccgtactcctccctaccagaccttccattttcagaaagttccaaattaagacaacgctactccgaatccgccatggccccggccctagtcagggtaggtgacgcaagccaaaatccccaccaagtccctgacaaccctgacaagataacagggctgatttgttggcggatccccataggccatcgataaaccctctaggctcttacctcttgcctcctaggtgcatggccccagattccgaatccgaatctgactctgtgcggtctgtgctgagtaatatattgcaatgcaaccccccgagccataatccataatcattaatacgagcttactacggatacgtcgtacgggcttatgattccgtatctggcgtgtttcagaatacggtcccgcttgcacttccatcgccaaaccataacggcggttggcgggtggaggcgccttcgaagacccgcttcgtacaatacataacaggaggcgatggatggtgggtgtcgatcgcacagccctgaggagattgatagggagacaggacccacgcgccggcgaatcagcacgagacccttttcctgaaataggtagttgctggttctggttcgggttctggttcgtacatctgtgggcggcgaatcggacgtgagcaggagttttctggcgctcgccactgccaaggctaggaacagggattgggaatgggctaaacgagtaagagatttttatgggattttctagcacttgggtgggagactgagtgcattcatattcatatcatgcgatgttagatagaattcgtagtatggtatggagtacggagtagcaaggaaatatggctagagtgattctagttaatctatcagttgagttgattatccggacatcaatcctccggtactgatgcgagggatccttctatccatatcgatgtattcatgtggctggaaaaataagaattctcagtcatcaactaagccaacctaggtatgagctagaatatctgccttgtctcgtaaacgaaagcgacgagatacaacgcaaagaccaagtcccgtcaaagccgaagcaagctgattgaagtcccagatcgaagaaagcaatctttccacatcagccaaccacaaaggatcagcaaacatcgacaaagctcacgcatcaacaagaccctttcgctttaggaatagtgggattttggctatcatcgctgcatacgagtagattgtgctgatagaagcctcgtttccgtaagccagatagcttagggccgactgtccgtgtgccggagagccgatccatatgactcctcgcctgtgtttgcacttccacctgttgttgttgagattgagtgtctggagtaaatgtcctatgttagctatctgatgctcccactgatcactttgatattctattcttacttcaccaaactcttcagtcatgtcggtggtaatgtatggatgtagcttgtctccaacgagcactgggacttgttagcagactgagattgcatgctaaaatccttgcaaggggcccttcaatcggcatgaaagaagtgcttttctccagtagcgatcaatattcatagggaaagtaaactctgagtactccatttcgggttggggttgctcacgtttgtcattcacgtcatcctccttttttcccttggagtccttagggttggagtcatactccagggattcatactcctcatccatgtcgtaatgccccttcctaaagtcgtcttcttgaatcactggaacaacctcaatcttgatcccgagggatttgaaaacggagtacaacacaaggtcagcacccttgagtgccctcggaagtagcattggagcctcatcggatgtatgaggataagcgtgagagcaatagaacccgagagcgccacctagggagagttaacttggtattcttcgtccaaataacggcatatcgcaaacacacccttttgcatgaagccaggctccatgataagttcttgcaagtaaccatatagcggaaagctcttgggatcaacaatcatgcttggtggaatcgatcctcccactggctcggttatgtaaaggttgtacgtcaaggtgatccgctcgccttccgttattgttttgatctcgtgctcgcagtcactatagaatgctgcccactgaatggcaaacgcgctctgctgatcccagtcaaacacaacctgtcttccctcgtgattaacgaccaagtcgccccctttgaactgagagggtaaacaaacgaccagcgagccgatttgggtcttggatcgcggcgtgtccacatgctgccggaaaagcccagatggtcccgagtaaacctatggttagcaggcacattagtattcgttgcagaagaggtattggattagcatacattcagcttgtataactcggcactcagtttccggaagggcaaagagtcctgcgcctctgtgttgaagttcggaaggagaacttgctccacattggggagaattccgaattccgctggatggaagctggtgaagaaatgttcagggtcaagctttccagcctttcgatattcagggtcgataacatcttgctgtcctctgccaaagctagcaggatcgcaaactgccaccaactgacgcaaatcatcggatgcagattgggggttggcgttcgcatcaagaggtagagccaattctcgcgcgatattatcaccatctgtacgccagcagattctcactggcggagacacagagatgggtttggaggacttcgaattagctgcgacatttgtaccaatggggacaagacctccacagacaaaggttgcagatgccttttttccgacaacgaaagcctccagctgtttacagatcttcttgaacgcgaggccagtcaatgatggaaccgcggacttagacctcttcttgctcgaagaagccatggtgggctaagatgggaaacagtagggaggaatgggaaaaggagaaggaggatagttaagtaggaggagggaggggagacggtgaggccataaaccacaaacaaccctggaagggaggtggttgcctaaagttggaggtcaccatgcgtgccagcctgaattcaaacaaaagatgtctaggctacacctcctgcctagtcaaaagaatgcgcgaatattccatactaccccagcgtctgactgcaatatgacgtgcaataggatgtcatcagcgcaaagagattaggtgaaaactaaggctcaagggtgtagttgtagctttctgggagtcagttttcaaccgtttcatacctcttagaatgaagttgtaatggccgccagactactccatctactccgtatggagtagacatcttgatctatggcttatatacgtggctatacgtacctactatattgcctcgtggggctttcctatcctagctgccgccgctttcatatgcttccaaggcaaagaaaggcattcgtaccaaatgctatctctttcgaccattgcaagctcttggtcttgcttgttaccgacttttcccatatgacgaagccccagagagctcaccaggaagacaactaccatgccagcaaatataatccaatacgcagcacgatacccctcgagaagctgaccgcccgtttgagaagatgtacttgtatcgtttgccgagccatcatcttgggcggtggaggaagcggctatgacggcagtgacaaccagtccaacacagttacccagttgggagatggtattgaagacactcccagctagagccatcgagtcatcagggaatgcccgagaaatgatcagactagacacagtctatagcactagccaaacgataagtcggtatttgcatctttcatatcagatacacaagttgaggaagttactcaccattgattggttttaaagttatagcaacaaaggctgcagctcaatatttccagttgggggaggcggccgccattaaaataggtgaaatcgcagtcatcagtgcactcatccccagcagcaggttgacattcaccttcgacatcagatgagcagtaactatgttggtggccacgccaactacagccataggcaagaagcgaatggaagcttggagggccgagatgtcctggacgtcctggaagaacaaagttgatatgtactaaaaagagttgaacccggcccatgtgaagaaaatggccacacagataagacggcagatttcgccataaagcatttagaatcaaggctggcctgttgtgctttacctaccatttcaccaaaagcgagaagacagggaggagtgataaagagataacgggtagcacgatgtattggggctcatacatattcctgtaggtatatgtgaccatcctatagaaatgtcagcaacattggataaggaattaaataaaaagatcaaggatgatccacgcaagtacataggatagcaatccaaatgctaaggcgagagttgttacgccaatccaatcaatattgtaagcaagcttataccctgtttcccggcatagcttcatcgaatccgggtccgatggaaggatcaagatggatccgatcaacaatacggcatcgataatgccggtgatgtaaaaccttcatcaccagctaatggtattggtgaaaacaccaccaagaatgagtcccaacacgtagcctagtggctgtcccttatgtcgctgcaaaagcaatgtacctctagcgcccaggtggaaagaacgcagtgactagcgacgtggatgtcgggagacacatagccgcaaagagccctagaagcgcacggaaaatgatgaattggttaccagtgcgggcaagtccacgagaagccgctcccgatcagccacattctcctagagccaaccacatctgcaacggagccgaatgctagcaaggtgcatcctgcagataaagcatataccgatgccagctagaagatcagattgtggtcgaggttgatatcggttgagatacgaggaagtgcggtggtcagaatttcagttcccgggacactgataaaagtgacaccagttattatgtttataatccagagcgactccaatgccgacttgccattcttttccaatgactcctcggatagaacgttcccatctggctttggcggctctctttccgtttccacgacctccttgtcgcgtcttttatcgtacgattccgccaacgccggctgttgtggtcacggtcgtcatggtcgcgaaagctgctttgtctcacggtatgagagatgaaagagaccattcaaggaatccggtgagaacaacaggtcacccagccctccaaatatgacggaaggaagttgagaagtggctgaggaaatcaagtaagtaggtaggcggcattcagtctaggtctacaatgagggaatattctgtcaaaggcggggaggcgaccaggtgcaggggtacgactgtgtatggcgcgtatagcgctcaagcctggatggcatgcctgaatgcctgattcgcgcctgatattgctgcctgattttagaccatagcatggcaaactatcaaccaatatcccgtacaaaatcttttttttccggtgtgttttaacctacatttccagtgaaagcagtgatgtcgtgccatagtgcttatattatgtagcctacatatactccgtcttctctgcctttttcattctctttttccattcaaaaacatatatatcttattcttggtcaaattgatcttcaaatgggcttgtcataatagaggaagctcgcagtgcgaactcgcaatcatatttcctgagtatatattcaaggaaagaacgataggcagtctggcatagcagacaagacgagagcaaccaacaacaccaaccttccaagtaggccagctagcaagtataggggatcatggagcctcagttatcattcgatcttcctagaaaagtagcaccttgcaaaatctccttcactctgagtctctaccagacatggtaaaccgaaaatcctttctgcctgaaaaacagtgctcaggctttgccgcttttttctcactgacggtccattacataatctgaatgatttgctcacagattatgagcccctgagcatcctgatccacccactgatcatcctctaagcactctgagttgctcaccgagtgctcactgagtgtactcctgagtgtactcctgagtgtagaaatgagcggtctgaggacggattacggagtaagtttcatgaataactataaatgcgacacgctgatcccatcacgtgcaaccctctcatagatcgcccatcaacgtgactagtgttttgcatctgtcgacagacgagtctcaatctaggtattagatagaggaattccagtacccacgtatacctgcctttaagcatattcataaggctcctatgccctaataatccgtataatgaacgttcccagtgcaactacctgcatatgatgtcactgaagaattgtggagtaatcttccttgaagaacaattagatgggcgtaacccagtatgaattcaggcattgatcagcataacttaagcattacatattaactaactagtatagatgataatatctattccgagtttaatttgaccgaaggccaaaagtctccgacaagcttggactccggaggaattccatggtcgtacgccatatcaaacatctgatttgtggagactttgctcggagaatcgccctctatggtttagcttgacatcaaattccacagaactcctagacggatctttaatccgtttatggtttgatccacacctatcagagatttcattggcagtgatgtgtaggaactggtagaaaatggcgcggcttaggggctagatgccgatcaatcaaagacatgtaaaacttgtcagttgtagaagctatttggtttaaaaggagtgccgtctgccttttcctcttagcgctaccatccttcattttcctgcaaaattacatttacacaacatcataatgagtatcacttttgaggttttccgcggctccaacgagggcaagatcgtggccgacaagaccactcgtgtcctggagcccaacgaggtctacatcgagacaacacactccggtctgtgtggcacagatgaacactacctcacttccggcatagctctcggccatgagggtgtcggtatcgttcgccagctgggccgggacgtcaccagtgtaaaggttggagcgcgtgttggatttggatacacacactacgtgtgtggaaactgcgagaagtgcttatctggtacgagttccaacccccaaaccaagaccgacaacttgctaatagtaaaccaaaatcaggctgggaccaatactgcgagaataagaaggagtacggctcacacgaccacgacctaggctcgttcagcggcggcaccgtttgggacgctcgatgcgtcgtccccatcccggacggctatgagtccgccgacgccgcgcccatgatgtgtgccggcgccaccgtctggacctgtctgatggagtacggcgtcaagccgatcgaccgggttgctgtcatgggtgtcggtggtctgggccacctagccatcaagctcgcttcggcgatgggctgccatgtggttgttttgtccagctcagacgcgaagcgcaaggaggctttcgagttcggcgcgtccgaataccacgtcttccgcaagggtgaagaactcgaggacttcaagcctgtgaaccacctactgctttgcggcagcggcagtgtcgactactccagcctcatcccaattatggatgtacatggctcaatctaccccttgactgtcgacatggttccctcgcccgttccccttgtgttcatgaatctcaagggcatccgtatccagggttcgcttgttgcatcgcgccgcagtctgcgttcattgcttgagtttgttgccgctaagaagattaccccgactagcatgatcttccccttgaccaccgaaggtatcgagactgctatgcagactctgcgtggtggaaagatgagataccgcggtgttctggttcgggagtaaatggtgatcagcatagatggagagaggttttaatagtcagcatgtattatattcccactagtattagaacgtttatagatatggcaagtgcagatgcaatacacgaaattgagacaatacctcgttagggtatgcttaaattatggcggttggtgagattttcacatagacatttttgagaatagaaaaattagggtatgagaacaacgttaccgacttaaaaggcttctttaggcgctaagatgctgatgtggactgtgctcagctgggctgtcttctgattggctcgtttatacgaggcttgccaagcatgcgtattcggcttcaggcttggcaaaccattaaaccatcctagtcccccatgtagctcaactcaactggctgtattttcgaaaattgagatcactgtgtaaattcacatgttatatagggtacttattcacggttctgacaatctgaacgtgtttatttacaaggccctcgacgggaaatgccatgaacaaccaaaaaaaacaatatagaatacatatatcaatcaatcagaaaagccaccaactcctggtattcaccggatcaagctgcaccatcatatttctgtcgtctcttcatagacttccattgaacaagtccagcaccaataaaagataggagtgcggcagcaacagacacgtagaatgtctgaatgacagcaatgttataggcgtgtaggacggagggcagcatatttttgggcacgcgctgcgataaatttgcagcgccggcttttattaacgcgtctgagttgatatttggagcataagccgttatgcttgcaacaaggcgattctcaaaaacggtttgagcaattgaaataaacattgcgccgctgagactctgtgcaaatgtaataatggcgattccgattggtatgtcctgtaatggcagtacagtctgaagtgcgttgatgcattgctgaaagccaattcctgctccaattccaagaatgacttggtatccaatccactccggatatccgctgtttactctgaacgtcgtacacagtccagaaccaaccgtgagaaatgcgcttccaacgaacatgagtggcgtgtagtatccaacaatatttaccaataaccctgccaaagcagagaacacaatcatagccaccaccatcggaagattgttgattccagattgtgaggctgaatcttccttgactgcttgaaaccagatagggagcttgaaaaatgttagcaatgaagctgataggactgtattgagaacccacatagtatccgaagacaaaaaaagatccacctaaaaatgttgcgtgaatcactgccccaagcacatttcgattcttgagtaaacgaggcggtactgtagcgtcgtcctgcttccagacctggatagcacaccacgcaaaaccgaatacgccgaatagaacaaatagggcaattattcgagcgttgttccagctgtatttggtgccgccccattgcaggcataacagaagggagacgacggcggggatgaatgcaagtataccaagaggatccattcgctgtagttgtccaaggcggcttattttgggttttggtgatgtagagtccttgaagaagaataaaatgacaaggccggtgaggacaccaaaaggtatatttatccaaaagcaccatctccaactgacatgatcagttaagagtccccccagtctatggttaaattagccgccatctacgatattggaataacgagacttacagtggtcccgtaattgtcgcaatcccactagtgctaccgatgattccgaaatagagggcacgccggtgaaggggcacactattcgcaagtacgagtagagcacccggggacaatcctccagatccgatgccggcaattgctcgcccaagaatcaatcccttcgatgttggtgtcactgcacatatcagagagccaagttcaaacaagccgagagcaatcatgtatgtccatttcgtcgagtaatatgtgtataccttgccaaatggtagggtgacggcacatgtggttaaaagataagcactggcataccacgacaagtcgcccagtgagttgaattgttcagtgattttgggaacggcggttgagaggattgtgttgtcctggtaagtcgtccgcattagctcatgaaatagtaaccataatcgtcaagcttaccaaggcgatacaaaaggattgaaagcaaagtcctatcaaaatcggagcaagctttgagcttgatggatagacttgcttttcttcttcatcatcactgtccccagttcgagcctctttcaatgggatgtcatctcgatttgtatagacttcatccccgaaatctttcatgcctgaactgtgtgccattaaactgcaagttaaatcccccagttgttattgcaactgtgagaactcatagaaatctgtttgatcgaatcatccgtgctgaagcctgaggagtgtttgaaataggcaaggtagaagctgccacattaaatccaagtgtggatgtacagaacttgccttgtagtacatcatgtacctacattactactgccggatgtaacccgataaagcaagggggttatatcttgatttctcggggtttttcactttgtcctggtcacattcttactggcttgattggtatgcaccacttcttccccgacaagacgcttgctagacccaagcagcatatacttatttgatcaaattatatggatcatgctctgaaaatatcacttgcccaattgaataatcagtctaataacaaataaggctgtatcatttgacatcgttagtcactcgaggttgatcacttccgacgtgatgaatctcgagacccttcattccagtgagactgtaacctcactaaacacagaacctatgatggctagatacttttagtaatgaatagcttcgaagcctgtgcaatattccgatggtcttccaatcaatgtgccacctctgtataaccaactaactcgcacaaagcttgtgtgcgttttatcattgtcaaaatacactgattttctcatacagaccaccaagggttatcgtggccggaccactgttaattgacgagataatatatatacaaagtgcaaattgatcgttggagccggaataaacgtggtagccacaaggccacaacatcactcattaaagtaccgtggtagcagcttgagcaagcctcaccaactacccttgtataatataaaattgtatactagatatccaatattgggaggactaattcgaaagactctagtgatcttattgtagtgcgaagaaaacataagattgcccgaggagactcagcaatcgcaagtatctcaggcctcatttcgaagggatggatagaaggggcacccggctaacaggtttctagccccgtcagattttttaggaattctgatccattaacgatgtaagtagaggagtgaatattattccgaggaatgcatgtgagctgattcccaactttattcttctatgagctctattcttaccaacgagaatcgggagctcatactaggaagcttcttgagctgtttatattatttccaacctattgatcacataatcttcgctcgccgatttgaggcctaggtataaagcttttctttctttttgtgcggattggtccacggatagaagatattatgacgagctcgaacgatttgtcagtgataatgtagcggaagtgcagtaagcctagattcgatggattgtatgtgatttgtgcaccgatacttaaattcttaagactagatggcatgaaagtatatgttccgacacctagcggcgtgctatgaggagcattgtgccgtgggagacttgacagtgagtattcgagagggaggatactccgtggtggttgaccagctccgggactcataattttccgagaacggcagcgaaacaggatgtaaagcatgaagtcggattggaatgagggtagaagagctgtttgagctacgtaatcactatttggaggggcaacccctccgatacatagagtacatatgtaaataccgagcaaatcttgaacaattcggatctctatcgataaaacgtgtcccccacaaaatcaacaaggcccaatagttcttttgatccatatccggggcacttcagaccacagttatgacgcaccagaatggaaacccgacggtattcagtagtgatctccaagtttatgaaaatgcgagatacagaaacacgcgctggagcgccccgaaacgtcatagaccgcgatctgcacgccttgtcctagaactctatcagtcgggccaaatgacttaagtggctgatgcaagggcatcattctagaaaatcatagttgagaaaatttgtatatcgatgtgctccatgtcttgaactggtgccgccatcaacactccttcaggcaaaaactccctagtctctattaggaatagacccggaatatcaatattccttatcaacaatcagcacaaaaatacattgctgaccaatcagtatctaccgctttggtctatttactttcctttccccaccgtcagcttagagtcaacttcccatcattcctgcaatgcccgttacagttgcgcaaattctcgcgccctacgagtataaaccagagcaagtggagcgggtagcctcccgcacggtacaacctcccattaccatagttgagcccaacccagaatggccgcaacggttcgaagaagtcaaagcgcggattcaaaaagcccttgggcccttggtctcggagattactcattccggctctaccagtgttcccggcttaccagcgaaagacattattgatgttgatgtgacactgaaagatgccatgaatgaactatcctatgtgaagcctctggaagaggcaggttttcggttcatcttgcgcgagccgctttggcaccaacaccggttctttgtggagaactggcccgaagcctaccacgtcaatgtccatgtgtggggtcccgactcgcccgaagctacgcgacatcgtatctttcgtgactggttgctcaaaacgccatcggatctagaactatatgccaaagtgaagcgcgaagcggctgaacaagcggctatagctggcgattcgatgatggattataccctacggaaagacgaaacgatccataagatcctaggacgagcattccgcgatttaggctatatttaatgaaacactcaagaggcgattaaattggtactgtcacgatctggaggatcggtggctcgctcctacccgttgcgctcctacccgttgaggaaggaaacgttccttcctattgcgcagggaagctaagcccgcgcattaggattttgcagggtttgtatgatttgtacttattgtttcgttgaaacttgagatacggagcccactgctccaacgattaacccatagacctttatccggtagatatgaaatagggctgtatatattgtagaagtggatttcagccggaactgcctgattaggcaagttgcattgctccccaggattcggccccgggttttatagagtatggagtagtggagaggtgacgcgcaacatgtggggattggtggcatggtgtatatcacggccaaggttttttccctttttctccgtttctcccctttttcccctccaaagttgatctcggagaaagcacccgacaaaacaatacaaggcaatctagggctaaaaaagagagaccccatgcgggagtctttataggaacaagagactgaaagagatctataggcgcaaagatatacactatagaatattttatttctccttcacgcttgctaatgcaagttcatattttccggtgtacggagtacagaccgcattggggaatagaaagacatatgagactctcgctcatatgaacactgcccaagtgaccctgtgcccgggctgctgatcagagaggaaggttaaacaaataacaagctattattggcacttagtggcgtacattggcattgaatttcctaagagtttccacttggctgaaatctgataggcggaaaagtgatcggcgggctctgatcgtgcacaagcccaaaacacccgctaactgagtctggagaagccgagagattgcttaatgaatttgtatttatgtactacctgggtgagacaggtattgattggatcgggtgggcactcagattccaaaagtcgtggaaatgtactccgtatcgggttggcctccaatgtccatgcaaattgttgtaaacctggaggtggtgggaacagccaatccacatggagcctgcttgctcgcatagttggattcaaggataatagtggaccccgagcagtagcttcaaatcaaattatgtgtttggtctggtgtacaaagtatattgaagcggagggcaagaaattatccaggccccctggtctagagaggtcaaggctcctagaagctttttaaaaccagccgaataccccgcgatgatcattctttttttccgtgttatatatattcctcattttatatcttctggcgtttcggtctatatattggcagattaaaagcatatagaggattatcattgaacgacgccactatgcagaccaggcggttcttgggcctcaacggcaccaagcttcagatcgccatcggcttcttggctggcatggacttcctgctgtttggttatgatcaaggcgtgactggtggtttgctgacactggactctttcgtcaaatatttccccgaaatcaacactctagattcatataccgagaactggagctcagcagcaaagagcaaccagtcaacccgacaaggtatcacggtcgcagcgtacaacctgggatgtttcgctggctcgattcctacaatctggatcggtaacattttgggtcgtcggaaggctatctttgtcggttcttttattatgtgtatcggtgccatccttcagtgcacatcctacggacttgctcagcttgttatcggtcgattggtcactgggttcggttagtatggcgaaacacatggagtagcaatccattaacatgaactgcaggcaacggaatcaacacctctacggtcccgacttggcagtcaggtaagcaaaatgaagacaatcccgcctcactgtattgttccgattcgcctcgccgctatatcttgattattgcgagcgatggattggcgagagtggcagtaaataatgaaaattatctaacatcgagtagaatgctgcaaatcccaccgacgaggtcagatggtcatgatcgagggtgccatgatcacatgcggtataaccatcagttactggatcgatttcggattgatgtttgcagacccaaacgaagtcgcttggagattcccgctggcgttccaaatcttcttcgccgcgattattctgggtttcgtcatgttcctccccgagtcaccccgttggcttattctaaagggtcgcgaggaagaagcaaaagagatcctggcatgcttgatgggtgacgaggctgatgagttgttcatcgacaccgaattcaccgctatcaaggctactgttctcgaaatggcaacgggatcattccgggacatgttcaccatgggcgaagaccgtcatttccaccgcactatgttggcatatgtcaaccaaatgttccagcaaatttccggcatcaacttgatcacctactatattcccactcttctggagcaacaggtcggactggatgccacgacttcacgtcttatctctgcatgtaatggaacggaatatttcatcgcgtcctggatagccgtgttcacagtcgaaaagtttggccgtcgaacactcatgctcttcggtgcggtgggaatgtcgatttcaatggcggtgcttgctatcgccgacagcatttcctcaagccacaaacagacctctataggtgtcaaggcaggtgtggcacagacagtatttctgtttgtgtttaataccttttttgccatcggttggcttgggatgacttggttgtatccagccgagattgtcccactgaagattcgtgccccagctaatgcattgtctacttcttcgaactggatttggaacttcatggttgtcatgattacccctgttgcttttgaaagcattggttacaagacctatgtcattttcgccgtgatgtaagtcctttttggtcccctatcactatattttgtactgaccagcttagcaatgctgccatcgtgcccgtcgtctatttcttcttccccgagactaccatgcgttcattggaagagatggaccgtatattccgcaaaactaccaacgtcttcaatgtggtctcgcttgctcgcactgagccccatatgtatggttcaaatggtgaactcttgcgtactttggatgatgtcgaggatgatgctgttcgtcgtgccagcttcctaaacaaggagagtaaggttcaccaccagagccacactcagcacgcagagcaatacagcgacgaacacaccagcgaggtgaaatgatctcggtctgttgttttgagatcatccgctctcttctccagacatctagtatgactttactgttctgagccatactgagttattcatttgtagccatctcgcgatctaccccaatacccctcgttagactgggcgtttttcattctttcatgatcctgaaatcacattgcacataatatttctccattctccagctccattgaaccttgtacggcttcacttggtgcgctctcgagttctgctttaagacacccagtgttatagattctatcgattcaaaagaaatagggtttgaacacaatcgttggccattctatgagatttaggtatatagctgatctctctatggtctatacatcaaacccaaaagacgaaaaaatacatcagaaacacacgtatatcgcgagaccaaaaggatttacagcttgctcttggctggctcattcttgagcaatgccgagttccatgggtaagggtcaaacaccaagtcgttaacagggttctcctcgcttgcgcggcggaacagatcctcgtacaccttgccgtcatagcgacccaggctgctgtccaggtgccagtcgggaatcgcccaagcatcgaccaatcggacagcgtgcgggcggatcgcgtcgagtagctttaatacggcagtagtacgagtcaaggtaatttgtcgcacagtaaccgcaccggaagagaagaactcggcggcttcacgctctagagtgtgcagcgagaagagtctgaataattgatgcaggaggcccttggtctctggatccaaggccgctgagagttcaggggaggaaaccgcctcgtagaagttcttcaccaccaggtactgagaatgagacgtagacaagcgccagaagtcaaccaaaaggctgttccaggagcgcttctcagcatcccgatgcttgagggcctcgaaggtcagatgagctgtgcgccaggcaaaggcagccacaatgtccttgtcttcatcgagcacatcgaatgaagctcccttgtcgcgacggtcgaggtatgtctgaagaatgcggctagtgtcgttatcagccggcttaccggccaggacggcacgggcagatttgagaagctattaatacggtcagttaggagtaaatagaatggaagaaagaactgcgacatacatattgtgcaacctgctgggtcaacatatagttatcaccttcccaagtcagtgtgggcagataatctgcgtaagccggtccaatgccgctgtagctgctgtatccgtgaccaccacaggcgcggcggcagacctccagaccctcaccggcagtggtactggcgagagccttaagaccacatgaggtggcgtgcagatccgccaggaggttcgcaccggcacggagttgctcgggtccagcgccccgcgactcctggtcgggcgaactggctgccttcatgcggctttgattctcctcatacagacgcatcataccgcgaccagtgaaatgaagagcatacatagatgccaaaagtggaagcaagcgcacctggaccatcttatagttcagtacttgggtctcacccgcgttcgggtccgaatcgcgatcctggaactgcctccgaaccgcacagtaacgggtcgcgatagtcacaccgcgagccagaacaccaccggcatctagaacaatgttggcgcgcacccaggtcatagtaccaaagacaagagatggcacagcaggcttagtatagcggttcgtctctttgtcgacctgacagaagcgggccagcatgttcacatggggtatcttgacgttgttgaacagcaggaaaccattatccatagtgctaagtagtcattagtgctgataccggccaaaaaatgagagccgacttacttgtagccaaatttggggccaatatcgcccacatatacattatccaatggttgatgggtttcgaggtcacggacctgcacgatgaatgggtgaggaccatagttcttgccatcaataaaaagctgggccataaccacagcgtgattggccgtgcgaccgagagatccaatccaccacttcgaagaagtcaatgttggagagttgatggtgaatgtcttatcgtcggagttccaggtggcggtggtttccaaaccgcgcacgttcgatccatggcccagctctgtttgcgcgtagcaaccgataatctcgtatttttctgcgcgttcaaggaacagcttgcgctgctcaggagttccttgctcgcgaagagtcacctagataacgaccaaagtggttagtttagttggagagttggattattgacaagggtctaattcacttactaggaacatactagcgtgcaaaccgtaaggggtaggttcaccaatcaagtcattagccgcatggagctcttccatcgaccatttgtgctcttcggcaagctgctggaggcgcttggccttgcccagcgatcgctggagccgctctacgcggcccaaagtatggttctgagacttatcaaatactttctcgggcttcaaaagagctaggatggacgctcgtcgctccaaagtttcctttgtgtgtagcaactcggataatctttcgacgttgacattcgattgagcacgctcttgctggaggagctcagatccttgcggacctgccggcttcagggctttaacccaatcaggaggaggtgacggcattgtgaaaaaaacgggatatattgggatagatgaaagagagaggatggggaaagatggggttatgaaccccagaaagaaggagaaaggttagaaggttagaagggccgaggatctcaatcgggaaagagcctcggcttaggagggctgaccaatcagggaagcgcagctcggaaatggccccggggaacttcatttcccgacctcgggagggtcgactccctaatttaccacttcccttatgtatggaggccacaaaattatacacaattactaactaccggtggttcattccgcaggattccccccgcataatggactcgttttgatatggggaagcggggagagaatacatacttttgacggctctcacggttcaactagtcccgagatcagcccgatcatcgggtattagaacggcttacgggttctgggaaatgacctaatgttttgcctcagctatgctcacgtgttaccaaaaatatccccggatcatgcggtcaatttatttgagcgaaggaaaaaaggaaaaaagaaaagagtcacgtggaacggggtacaacatatgatgttgtacgggatgagcgaaaagtccgaattatcggatctgataacaaaaagttcccgcgtcattctcacatgtcaaatgtaccaacatgtgagagtttttgtctattcattgcgcctgaccttggacacccgcggcaatcctagccacgtaatcagaatcgcaccggatagggcaatgataaatggctgcagcactttcactcccttggcttgtgcaagcacaccaacagcaaaagggagaatagcggccccgctacctccgaaggcagcgacaaatcctattgaggtaacatgcagatgccgaggaagaagcttcgtaatcattaccactgctccggggaaaaggggccccagaaagaagccttgcaaagacactgccacggccgatgcataaaattggggcacaagccatagaaccaaagcaaatcccatggagcaaactatgtaaacctggtgggaatcagtctcgttatatcgcaagacagcgcgatgctcaccgaaattgcgactttctcgccgacccggggcgtcacaaaccctaacattactcgcccaatcgtgatacccaaccagaacccagtagctgtcataccgctagcaaaagcgctaccttgccggactcgaatcataaaagtaacaatccaccctcccagcgcgacttctactccaacatatcccagcaagaacaatgcacagagccaagtcacccgagcagctgggcgcttgaagattgcatccctcaagccaccctttttgttctcgtccgctgatggtacattcaatgcacggtaatcggcagcagttgatttccagaagcatgcgccagaaaataccagttcgatggccgcacatccgatctaatcgattaaacagtggtcaaatagctgcgaggaagttcagcacttaccatgacataataaaagtaataccacggcagaccacccttggcaatcattgacgttgcgaccaacggccccagaactgccccggctccatagatcccatgtaacacccccaacacctcatttgcattggccatgttaccaatccatgcattccacgcagaatcctctaggccatttcccaaacctgcaaagacgaatgcgaccactattaccggataaggtggatgaacgcagttaataatataggcaatgagatgagacgctggtccgataatggccacaccgcgttgacctagcatatagtggatgcggtgattgagaaaagcggcggccgtatagcctactagaggtgacaagaaaatgagagacacaatcgtgtacgatagatggtagtatgattccagctgtatgctggatgagatagattctagttaattgtagggaattcaacttacgtatggaattagagcctgcgaacggttagtagatagctcaccaaattgagaccacactgtctccttttgggcaatatcaacttacaccatatgctgcgtcattcgcacccatcacgaggaatgaccagaaagttgcaaaggttcgatgaatattcacgcgaggctggttccatttctctaacaacggaaattcagggcccacgggtgaacctgtatttgactggccatgaggcaacgcctcgagagcgataaggctcgcatcgcgcggattttggatcatacagtcagttgccatagcgcgtaattcagtgctgtaagaatttttgggcaagcagaacaaaaaagcagccataaaagtccgcaaaaagccttggcgcggtggttcaacccgcattgccggattgagatgaggggatagtgaggcgtagtgtagttaccccacattgcttcggtagaacttcggatgaggatgctactgaacgggttatcagccaccatttccggttacgttccgacaatggttgcgcttgttatttgtatgcgttaagaggtcatgcactagcagatgatttctgatagatcaactccatcatcaacgacttattgtgaaaagctaagtgctgtactaagaacaccccaagattgaagctctcacatagcgtccgtggtcgcttgggaccccatcgagtacttcgtccatttcctcaataacttctatgcattaaatttgatatccttacgaagaataaaagcattggatcgttgaaacatccctcgaattctaccatcagcacttcaagacgctctcctctgcaatacgaactcgcgcagtatttggattctacgggggttgtttttccaccaatcagaatatgttcatttccttataacccaacccaatgctgcgatcaaatcaacatattctaacagcaatgagttacattaatcccataatcccgggatttaaccctgacccatccattattcgtgtcgataaagactttttcttggtcacctccacctttgaatacttccctggagttcccatttaccacagccaggacttgattcaatggacattgatcggtcatgcgttgacacggcccagtcagcttcaaattcatacgccagagccgggaggaggcgtatgggcaaccacaattcgttatcacggaggtgtttactatgtcatcgctgcgagctttcagcgttatcgtcctcaacaggatgaccgagtttggccacaagggttttatgttaagacgaccgatatatggaatgagaagacatggtctgatccagtctattttgatcaagttgggtttgaccaagatgtgagtttgaagcaatggtatcaccacatgcatacatcacgagaatgacaattgaatactacagcttttctgggatgacgatgaaaccgtatatttatcggccacctacagaaagcttcagccaagtgcaggtgctaagctgaaagactttgcgattcatatatgtactgttgatctggccaccgggcattctacatctgagcctaaattgatccgggaatcttgttctggtgttgccgagggatcacatattttcaagcgcggtcgttattggtatttgtttacagcagagggaggtactgaaagcggtcatagcgaatgggtgaaccgcagcgaggtcggtccattaggaccgtgggaactggggccaaataatcctctctggcgcaatggcgttgaggacgaagtgcaaaacaccgggcatgccgatctggtcgaggacaccaaagggcaatggtgggcagtccttctcggtgttcgtccttcaagacagggagatacgtgggaagagtcagtgctaggtatgacctctcaaagtatcagttagttatcatactaaccttcccaggccgagagacatttctagttcctttggaatggaaagacgattggcctgtgatcaatggaggacagaaaatcagtctcgactcctacggacctggtctgtacaaattccacaccccagtttcctggagagatgaattttcagatccgcaactgcaagttggatggtatcgaaaaagtgagatccgaagaacgaacccgcctgatcccatctgactataaaacagacacgccctttgtaaaagactactcacttactgagcggcccaatcaccttcgtcttcacggcggaccctataacctgtcagtgccggccagcccaactatgttccttcgcaagcaaacccaccagctctgcaggtgggaaacaaagctctcctttcagccgatgatagacgaaaccgaggctgggactgtggtgtggttaaactattttacctatagcagcatcggtatcaggaaggatagcaagggccgttttatccgttttcgaccatcagagggcgacgtcgtggaacatagattggatataaaaactgatgtcactctcacggttgactgtggcaccgagtatcgatttgggtactgcgaaagcacagaatctgacatccattggatcgggtcagtttctaatagtgctgctatggcagcacctccggttggggctaattttactggaatgatgctaggtctatatgcatttggagagcgccagagatgcctggccccagctgattttgcgtacgcagagttcagataagtcaaccctataggaaattgttgatgctttgtgttaaataatccttttgtttctcctccatcttctttcaataccgtaagctagtttatgcaattgtatttctccttagttagttaccttctttccccttacctaagaagaataggtagttcgtgagcggatccatcgggtctagaagatcagtcgacaccattccggaggatctccgacgaaatatagcagctttccaattctacccgttatttggctacgcgtaacttacttcggaggcatggtagtcggcttggtattagaagcatccggggcccgggcagtgtactaggctgcatgtgaatattacccttgagcttttcaacttcagatctgctattccacgctcacatctagaacttctcaacgtcgcgtgagagtttgcatttccttctgtcagggttgtcactgagattcgaggcatgtgtcttcaatttatatgggtttgcaaatcgcgcctactacctgcgatttgggttgtaaggttagatatatcctttcagtttggtttcttattctatgcgtactctctcagcatagtcaagaccgcccctaatcacggccaggtcgccaccccgagttaacataatatctctctttgccaaaccacaaacgacgtccctcttcccagagaaccaatcgtatgggacgaaaaactgctcgaagaccttgatcgtcaggggatctttgcgttgcgcgatctctaacccactctcgttgagatcaacagagcatacccaagaagaccgattaaggaatacgagtttccttgattcgtcaattccgatgacatgggcaacgcttagtccgaatgctgtcatccgtgaacgaagcggagcggccgaactcaatgttttgaccattttctccccctcttcatccgtgacaagtggatcgaacgccggtacagcatctaattgcttcccttgcaagaagctgctatctctgttttcgatgacaaggtggtttaaatcaattatcgtaattctgttggagtcgacggagctgttcggctgtaacaagtctagcataattctttgtttttggccgaccgaatagaggatcgcgcttttgagctctgccatgtcatttttcagcgataatgcaatgcatgaaaattcagaccagtcactccaggagtaggcgcagactttggtgttgtcgatacagacaatgtgtagagaggattctggatgggggagccatttgcggattccgggaatttgtggatatgttcgctctgtcacacacttaccgctgtccaagctgaacaggtgatcagactcacgagtcgatactaggaacttcgccgccatttcccctactagcacatctatgattgccttctcggagtcgaggcgggatttgaagagtaccgtcaaatcactaagccagcctttgtctgctgacttctgcattctgtgtaggaagatcatgttggaggcatcgacactaaggagcgcgtctctccgttcaatccagaccaacaggcggactggtgccttatggcagtatagagtcttcaagctcgttgctgttttctgttcgtacagtacgacagatccatcatcctttccgcaaaagataacttcagacgtgtgatggaccaccatggcagtgatcttcgctttggcttccacggaaaccgtctcgaccactgtagtgaaagtggtcccgctgctgtcatcgctcaaggtctcccgcaacagagtttcaggttcccacacattgcactgggcgcctcgtatatcggcaaaaagcatactgtccctggcaaaggcaagctgcttgatgaatgagttggatgacttgacccgatacaggagcttgaagatatcaaattcataaacgtggataatcccgtttgcaccacccgctgcgaggagacacccattgggacttggagcgagggtttggcaattggcacgaaaacattccagctgccgatcggcaaaggggtcaaggagggcaagatcaccatcgaggtacactactgcgagaagactaatgtcaggattggggttgaaagcaagcgcaacgacaacaacatccgtgcaggtttctccgctggatagtttcttgccacagttaccagcgtaggcgtcctcttccatgtcccacagcacaatgggttggcggctgtaagcgacggcaagcattccgtgggtggtagagagagccagtgcgcatggggtcccacgcggaggcgttcggttcgtctctagcgtatcggtatcgctccatggcctccgcaccgattccggctgggcgccgtgtcccaaatcccaagccgcgacataattgttgcgactcacaattaaaagcgtacttccatcgaattccatccccaccggactgggagggctcgcgatgctgtgcaccacttgcccacttctgatatcccagaccttggccattttcataccacaagttgctacgaggtcagttttgggtttgaaagcaatgaatttgactgcttcaccgtgctccaagaccttgtactcctggtacgatgtggcatgatacaatatgacagttcctgaactgagaccgacggccaggaactcgtctccatagcgcaaggccctaggttgaccttgacggaaatcgatgcacagcagcctgtcatcccattgcttgttaggtgtgccaggcacttcgagcctccggcctgagcgcccagtgttctataccatagactcggtgggacagaatggaggtaccaacgagtatattgctgacggtgatatcgtgagcgcgttggcaaacatggcaggaatccgagcaaggtccgttgtccactgtcgtagtgcttgtaaccgagggtccagtggtgaacgctcaatggcacatgcattgacgtagatcttgagatgatttgaggcgcggataaggtgattaagacttttcgagtcagcaatcgtttcaatccaagtgaggacattggatctgaagaactgcacggcaagctggaatgtccctgccgccaacgggtcagacctcgagagatgataggagtatgctgtgtatgcataggcggcgaaatctaatcttgctgctggcaaacgtgccgaaggacggcgtcggctgctcctcggaggcttcatttcttccccgacaaggtagttgagacacacccgagccatccgtgtgtgtgcttgagttttttcgacaaagaattcggactcaagtccgccggttacaaggaattgcctggcagtttcatccaccatattaactctcccatatttgtccacgaccaccagttcaccacaaagcgtggtgatactctcctccaaccttgggaatgagtcgtgggtgtctaaggtcagagcaccatctagttcactgattgtcattggtcgaattgcgcatactgtccacataagaataattttggccagctcttttcctcgagcagcctgcgacatataatccaaagtccgcttatatagtgactccatgcctctgggcacgtcttcaagaatctggtaaatttccctcctgctgtggcagcgtataagttcttcgagcactaaaattgtccacaagaaggaccccatagatttgtctagtatcttctcggctaatgtacctcgatcatcaggtccgacgacccctaaggccttggttctattcttaaccaaaagactgagatctgactctgtgtctattatcgagattggcaaggactggaccaggtcgggtgcaatgaacgagagaccttggtccagatcgaccgtatacgacttgtgatgagaattctcaggggtatagattcgtccatgttggaaataatggcatataaaaggaccggaggattgaaacactcgtctagggcgtcgatgacccagaaatgccgagtcattgtggcctggaaaatgccagaaaggaagaggattctccagagggtatgttcgtcgacacgatctaagcaaacaccatccgcctgtattcctagaatcgcatcactagcttcgctattagagctagccatctgaaaagccagagatcggagacaacaacctaggttggacttcgacttgtctccatgtttgaagaaaaagtagctgcatgtctggccagagtccttgagctgatcgatgacatagccagcgagaacagattttccagttgctggcttgctctttatccatagtgtcctgtcatttccggattccccatctctccatttgacgtgactggctttggtcgaaatccatccgcaggtcccatgcatccgagcttcgcagacatttgtaagatcattgtctaagatgtcgggaactttcaggtacttcttgagatttttgattctctcacgcctctgcttcagtttcagctccggaattgccgcggtaattttgttcacagtagaggcgagcgcgtttcggaggacggcatagttggggtctgcaggtgtgtcaaacttgcatatcgagcggtggtcagcagtcatgggtatctgctgctcttcacggtacccgaggacggccgactcgggatcgacgatgagtgagctaaacattttcatattctacgtttcgtagaacgaccagagctcaaggccggccgaaaaatgtcgaaatccgtcattgattacttggactgccccagaatttggttccagatcgccaacataagcacggtcgtatgcaaccttgaggaggttcttcagaatctttgccgaatcggcacctcgatgcggcgtggcgagaaaatagaatgcggcgaatcgcccagccagcgccttgtacacttcgtcttgtttagccaggatatatgctttctttatcactaagccacccttgctgtggccgatgacaacgatgtgtgttccagaattgagaatgcatggcgaagtgctgatcgcacctaggaatgacttgctaatgtggtgtatattcaagcagtcctcttttcctttcaagtagtacgaatcgtatccatagctatgaatgcggacgttcttgaatgcgggatctttggagagccactcccttggccagaaattataccgcagagacgatttggtccatgtttttctagaattaccgcctaggccatggacgaagatgaagtcgatctccggtgccgtcggggaatataggagactcagtccaagagggccttttacgctctccgcttgaccgtccgatgtgtttgacgtcctgggcagggcctttgacagagaaaacaggctcctcgagctcttagtcgagtcgcgactacttgagggactgtcgggatatagttcgggctttgcgtgccgctgctttcgaaagaactggtacagtcagcgatctggtaagagggaagtttcccaggaggccaaggaggtgagagtcaaccattgtagaccaaaaaatcccagtgcgtacggcgtcaatccggtcgctcggacttcaagaacggtctgccaatcaagagaataatagaataatggttcaatgggagttgtttcaggagagactcttggtaatgcccaacaccttggaattgaagcacgtaatatgtacctacccctccttcgaaccaccaatcagccagttgtcttaaccgctcgtcaacgacccccgccgactcgggaaagataacggtaggtatttacccagaaactcactccctttcacctctaactttgacatttcttgaggatgctgtgctgatttggcgcataaaagggattgttcacgcattgtatattatttcagagccatatactatgggttcaatgcatccaaccttcgcagttggggaccatgaggctttcatagaattcgctctcaggtacaaaaatcaccgccagctgcaaacaaattctgcgtcggagccatacttgtcgacggcgctaacggcaagatgctatcaacagggcactcgcttgaatacccgcgagattacaatgaagatctaggcaccacgcacgcagagcagtgttgtttcatcaagatcgccgatgaatacaaccttcccgaggaacgcatccacgaggtccttccggctaacacagtgctgtacacgaccatggagccatgcaacgaaagacttagcggcaatatgacctgcgcgaccaggatcttgaggcttaggagcgccatcaagacggtctacgttaaaatcaaagagccagggacatttattccgcacaatgatggacagcaaaggttggaggcaaacggggtcaaggtcgtgttccctgttgaacattggcatgataggatcatcaaggtctcaatgactggacattgaagactgagtttggagtagcgaagaaaggttgcggaaacacccggacggcccgagtcgccacgtggctctggacccttctttaccttctttgcttgtgtacagtgcttcgtcagtcttatttctgatttcttcgagattttataaatagatggtggcctagctggattgaatcaagtcatgctttaccccttcacgccgtcgctctcgcagacataggcagggggatactacaatgtagtcagcacagcgagatgcacatgtggatacacatacaagtggaactcgcaagcaagtggccaacacaactgagaatttcatacggagtacataaatgggagttgacccctcgggacgatagttatctggtgaagaggggaccctgtcacgggggacaggggcaccgacagccctgccagcgaaacaggtgtgagagcaaagtcgctcactgggaataataaggtaaaagagaggagagcaccaggggtggctactagaataatggaaagttgaaaggaggttgaaggtatctgcgtgcaataatttctacatcaggggtccttcatagttatcccgacctcgggaggttccgaggtcagcatagccgcttagtcatcctcgtcctctttcttctaaacagccttaactccgtgatccacatcgacaagcctaattggattctgccatcctcaactggcatgtggtggcagctcatcttcaaacctgttaagcaaagcgacaccctagtgcggatagccacaatgaccgaaagctcgactgttgaccaaatccccatctccgatgatgccgagcagaaggcggacaacgggtctgcattgagtgacccgatcgaacgtcgtcggcgacagaatcgcataaaccagagggctcaccgtacgtcactttcgctgcaatctattcaacagaggttaatctttgccgccaatatttgccaggagagcgcaagcgactgtcattaattaaaaacatccaccagaagagcctagtctcatcctcaagttcgacctctaacgtccaaacgcaagaccattcctcgcaagaccgttcttcgcaagacaatccgaaagtcaacttcaaccgcagctccgaatttctacacaacactctggagaaattcgccaagtcagcgtatgagagttacatacgcggggacccgagcactgatcatcttatgaccttgactaaggttaacgtctttcgaggattcatgcaaaatttgcgattaattggttggtcggagtactggatcgaccttgatgtcatttcgccgttcagtatagcttcgccacaaacgccccctcacatggacgataacagcctccttccgatcagcctgcagcccactcgaatccagaaatcgatacaccatcacccgtggttggacttatttcccttacctaagatgcgcgataatctcatcgaagccggggatgaatgggatgatgagcagctctgtcacgatatcatggggttctggggcgattcaacgatggatgcagggctgctagtttggggagacccttggaacgtgcagaactgggaggtgaccgagggatttctgaagaagtggcaatgggttattcgaggatgccccgaattgatgaacgcgacaaatagttggcgtgcccgtcgaggggagagactaatattccgctatgtttgaatcaacataatttaaactgggaaccagctttagcaatttactgagcagactaatattaaggggaggggttgttgcattattgtaaactaggggctatctatcagaaagttgtatcgaagagcaagtctataaaataagggacgtgaagccaaacaccaaaagtaacccatgagaacatcagacgtcaagatcatgaaaatagtagtcatgtcacacataaccccgggggctggggacctcatatcggagacctcgggtgagtttgtacttaggtaacatgttctttctcctcctctttaggaattcgcacccaaatcaacgtgatgaatgccgcaaccacttcacatgcaagcccaaaccaccagatggcacggattcctttcaagccgatgtcgccatctggtccctggtcgacttgggtgccgatggcatctgcgaccgctgtcatgattgcggaactcaagttctgcattgtcactagcagactcccagcactgccttgataagagcgacggacattgctggtgatataaattgacgctgctgcaaaagagagatccggaccgaaggtaacgagggccacaccagggaaggacagtgcccagtatgacgtgtttggggtttgtgggaggaagaaaacgggccccaagccaaatgcaaccatcgcagtgaaatagatatagtgacccgggaccacgtgaagagttcgactcaccacccaggtcgcgagcaccccgacaatagcattggggagaaggtagagtgcaaccgtgagaggagtattttgctggattcgtaaccagaactgaaccgcatagaactgccaagcaccctggaagccaccgtagccgatgaagtaggcaatcattaatggtgtaaagcctttcgtcttccagagcccattgggaatcagaggtcgctccacccagtgttcgatgaagaaaaacgcgataatcagaacaacgccgactgcaatcaaggcgtacgtgtagggcggccacattttcacagcgccttgagtcaacccgaacagcacacagatacagccgattgcaatgaagccagcgccaaggaaatcgaattggcgaatgcttggtacatcggctccgacaatgtcagcaactggaaggagagagggcatggtaaaccaggctgcaagaagacatagagcacagataatagcattggaaccgaagatccagtacagataagatttcagagcaccgccctgaatcccacctaaccaaaatccaaagggcgaggttgctgacattgcagaaaagactcgattcttccgaaggcctggcttgtatacgcgaccaaggatgctcatggacccagaaaccaatacccccacggagatcccctgcattgcacgtacaacatagaacagaatcgccgtcttggggtggattgagaagacacccacaatgttccaaatagttagccaaacgaaagccccgatcattaaggacctcggaggtgtcaagtcactcaatgagccggatatgaccacagagagactaagtggaagtgtgaaagaaccgagtagccagggaagctcgctgttgcgaattccaagagctcctttgaactcttcttgggtgactgtgatatcggcgaggaaaaacgaaaacagtagcaggccagccgaacaaacaagaacgaaaatcacctctgccgttaagctaccgagttcaggaggaacaccctgggactttgactcagatggagagccagcttcctcttgtagatcgggcaaccgagacgaacggcgcgttccgattcgttccatgcgggtagagggcacagtattgagttgatagtcgtcatccccatgtcggtcagtgatggaaagtgtccgcgatagattttccagagcttctcccatgtgcgagtcccttcgggttctcgtagtaggcactgtgtacaattcggggacatcttgagactcctcggggtgagaggagacggatctccgcctggtcgtctcatgagttgttgctggcgtgagactcgaactgaaagttcccaatttgtcttcttcaacgcgaaagcctttcttgacgctagcattatcggaatctagatgtgtcgatggcatattgtctcagacactcggattcgagcgtcttcatatatgactgtcgaggtatgggagacaaacaaaaggagcaatttgaaaaaagatcggaggggtatttttttctggtgaattgtcaatttgtgtgtggggacggggacgtccaacgtgattagcagcgaatttaaggtggtggaatgcggaaaccagaatccgtgagcagaagactattgatcgaaattttcaccaggctcaggtgatttgatatgtttggagggctggccctcgacaactcttaggcgagcgtggcctccaaaactttcgggcgattttgatgatcgggacgctttgggcgggcgcgaaggcacatattttgttggactggtctgatatcatcgagaacttgttgagaaacattcgaaatgcttcccaatatccatttttaaatggaacttgaagctgggggactgtgaaaacaatcgagtgacgtcttttgatctgataaattaagcatacagtattgccgcgtttagccgtttaccagattcatgtttttatatcatccccggctggcgtaagcgcggggataaactacattaggatacaaggataatgtttttttattcaacccctatgaatttgttgaatcgatatactcatattccaatgctcggtagctgcctggttctactgacatttaatcagtgctgttattgttgtgggtgatgacattcacattaaattagttgaggtgccgtgacaaaaatattttgcgcaagctcatgccttcaattacagtttctcctttcttccccatagctccaaccattctttaaccgaagcaccagatctaaccagctcattcatgcatatattgcgcacatagtcacatcgaattaccttcatggcgttacggacattgtggggtgagggagattccagggccttggccacccaatggccgtcatgtgcgtctaatgctagcacgataggatacgtcatctcgcggttgtgcaagtcttcggctgtagagcctttcagctttgcatactccgaagaataaacatttttacagtcattttggagctgcgaatgccagctatataaacgtcaaacctaaatcctagcatgtatctctaggaagggaccgacttacgcaaccgtagttaaagtttcatccatggaatcattctctaggacaaggtggcctagtaaacggaataatgaaccggtcttgagagaggccattcttcgatatgccgcaattctgtccgcagtggcagtagggaacgcacggattccatccctgcgccaaactagggatatatcttgaccttcaaggatatcctggagatcctgcatcagccatggggcgagattggggaagtccttcgttgttttgttgagaatctgggtgactctgtagtaggcgcggtttgctgtttcggatgggccgtatatattgtgagcagtgggtcgtcctttgcggtaatcgcttccgtcggagatctaagaaaatctctgtcagatggtttatcttaagccatatcaaagaaagtgggaagagggctttaggcactcacatcatcaaccagcattaggcagaggtgtatagcatccataatctccaacaccatccggtacttaggaggatcatcattatgaagggagggggatagcttgtgaacaaacgctatccaatgatgcttgccgtagacttcacgaagatattcataagggcattcaagtttagtaattctcttgggattctttcgtccgaccaggtgggcttttttgtcccaccaccgagggatgtgaatatgatcaacaattagatataggaagccgctcacaacaaccatacccaggacagggctgatccgaagaaaaaaattgaacaggctttcaaatagactcataatgtaaaatggatatgaatcgacttgcaataacgaagagagcaggatatgtgaaagaataatcaacgttcaaacatctatacttcgaagaattccttaaatgctagtcctcctgcccagaaaagtaacaagcaaaatgctagattcacaactgacgtcgcattctctgcacatactctggtgttatctcgtttacgcataccagatatatcttagtcgacggcgagtctatgagatttctgcaggtcaacttcaaacatagcgagtagaaacgaagaattactgtttccggggttccgaaatgttgcatatatacctgtggcaacttttccctgtctaaatatgcatgtaggagttgcattagggtgaaacggggtttattttcgcattttgcagggaatatgaacacctgcattatacaatatgattgtatatcccgattgcgataatgcaccgcaaacattgaaattgctttttgagtaatatacgttattcagatccttcaaatgtaggtcagatctacggtcattttcatcataatactgcctcatattctgccctactaagcacagaagaaatacatgtaattgagagcaggatgacaggggtttctttatcttacacggggagttaattaataaataatggcaacgctaaatgataccatggaccgagaatcccgtcatgcacacttatgacttacgcaggtggcatttgagggctgacattttctatcttattcatgtatatgtgttagttgcaattaaatttgaactcatgcataatcacccagttttgaataacagggctcggagaacgcgctcatcaaggaagctgtcacggtatctctacctatgctgaacctatatataggcgttgatttgaggggccttgattccgcactcagaattatttgattctttctttttgatctgcaaaattgccacaatggacggattcgacccctcccaagctccgatagagtaccaagctgtgaagcctctcgccgatttattcctcctcggagctgcacttgggtgggtgaccaattatgtcgggatggtctacacgtcgttcaatgaagagacctatgcaatgtcaattttggcactttgttgcaactttgcatgggagattgtctataccttgatttatccctccaaaaatcggcttgaacgaggagtattattcctagcgatgatcatcaactttggcattatgtatgccgcagtcatcttctcgccacgagaatggacccacgcgccactggtcgagcagaacctccattggatcttctccatcggaatcatcggattcctcactgggcacctcgctctcgctgcagaaatcggcgctgcgttggcgtacacctggggcgcggttgtggcccagctgctgctaagcgttggcggtatctgtcagcttctctgtcgtggaagtacccgtggtgcttcctacgctctatggtatgcagtcccacattttagatatgtctttcatataatattattgtctgaaagagtatcgataatcgattgaaaagcttacgctgacatattttaggttttcccgcttctttggatcgtgcagcgcgatggggttcgcagttctgcgttggatgtattggccggaatcatttgcatggcttagcagtccccttatactgtggagtgtggctgtcttcctaatcgttgatggcttttatgggctatgttactggtatgttaagcggtatgaaaagagttttggtacggcacgaacagaaaaggtcaaatgatctgtgaagaatgaggacagtatcatatcgatggctacattattggaagaaaatctgcagaagataagatattgaaacgaatgaattgcttttgtttgaatatctcacaatgtcacagtactatactgtggataatgctgcagtaagatatgtatcgttcaatatatgtagccctcttcaaaatgccatcaggtaaatttcaaagatatcctacccggcctcccatctacgtagacaggagagagtctcaagaatacgcacaggaaacccttcgtgttccatatctatccaagtcagtggtatttatttcgagtaagtaacaggagtctacctcagcaggtgccctctgtctaaataccagaatgagcaagtcagagttccaagtaatcattgtcggcggatcaatcggaggcttgactctggcacattgcctacaacgcgccgggattgaccatgttgtccttgagaaagcgggcaatccagcaccccaaattggggcatcgatcggcattttcccaaatggagctctcattcttgatcaactccaactgtatgagttggtcgagaaacacattgagcatctgagcatagcaaccatccgctatcccgacggttacagctttcaaagctcttttcccaaggtcctaagtgaaaggttagtcttagttcctcccattattcccgtggaagtatctttaaaagtatctttatggttctgatggcactgcacaggttcggttacccgatcgcattcctagatcgacagaagatgcttgaaatcctctaccacggctacccagatcatcagaaaatctgcctggacgaaagagtgacaaaaattgaaccttgtggtgatacggttatagtgagcacgggcaacggctctgtctatcgagggcaccttgtcgtcggcgcagatggcgtccacagcaaagttcggcaggaaatctggaacgcggttgagaaggctggctcgggagcggcaattgagagattcggtaagtaacaatgagctgtattattctctgatttatatgggaactgaacgctgcacaggtctcacggcggaatttcgctgcatcttcggcatctcctcccccatccaaggattgattataggagagcaggtgaatgcattatttgatggtttgaccatcattacgatccatggaaaaaatgggcgcgtgtattggttcgtcatacagaagttggatcagaaatatacttacccgaactgccctcgctacatgacaggcgacattgaaattgcagcagaggaactgagaagtatagtattctacaaagacctcgagtttgggcaactgtgggagaatcgtgagacagcctccatgaccgtcttggaggaacacatctttgaaacctggcatcatgaccggctagttcttctgggcgacagtgctcacaagataactcctaatatcggacagggcgccaatatggcaatagaggatgccgcagctctggcaaatctactgcaaagattacggaagggctcgggaagttggcctcccacagatggacaggtggaggctcttttgaatcaatatcgcaatattcgccatggccgcgtcaagtcagtctacaaaagctcccgctttttggtccgcctacatgctcgagatagcttacttaagactcttcttggtcgatactgtgtaccatatgccggcgacttgccggcgtatatcggatccaaatctattgccgacggggtgatgtgtgatttcctgcctcccccaaagcgtggtggaggcgggtgggagagatatcggactaaggacttgaattgggggtggattcaagctaccttgtatatcatcatctttactgttctgtatacatctatcaaccggtattggggtatggcggtcgagataaattgattttgatagggtatagcagaactacccgcaggcggtagagcacaataagccaataagatagcacgaaggcggtgtatgtaacgactatccttggaaccttagaactcagttcaaaaaaaatgaagctattcccaccatacaaatctccgcatacaccgaattctaggcgttgaagcaattgcgaccgtataagtgatttgtggggtggggatagctttaattcaatggtttatatagtcggggatagtttttagcgctagggattcgaagaaattgatgttttgtcgggtgggaataacttcaatttacagtacacgggagagcggtgtcgaaggcggtctaaaattcaggcatattcaggcaccaaccccgcaaaactaggcagaaaccacagtctcccacttaaagcacgtgaaatctccacccaaccggtggagataagatagactatcagtcatgtgatttgggtgggccaccagttgggtgaactgccccctgtcgcggtttgctgcgggccacaatcgttgcgccatcctcagctgaagatcgcatgatatgggcctacatcttccgcgtcataatccacggtttaacatgtttcatgccgggaaccgcgtatcaagtacatcgaggtggtatgcacaaatccctcaagtgcccgacaaagaatcagcttcttttctgtatagagaacatccatcgatcgcatatgccaggccagtttgctaggatcatggggcgatcggaccgtacggggatgcctagcgttgatggtgacacgggtcatgctccataaggatgtggatagacattatgaaattaactgcattatattgcttggacttgtcagactatctaaactgtgcggggaggtctgagatctatttggggcgcatattgacgaataatttcaggtgatatcgtcgaagtttcatggcattctacgtgttgtgcgcgtttacccgggcgaaaatatatcgatatggttccggtattagcaatcccaaggatgttggacctgatatgcatctaatatgcatgctcacatgcatgctcctccatattcattaggatgagatccacaattgatcgtacgtccgattcggtccgcttcgccggaactgattctcgtttgatgagtggttcctttaagattcctcgtctctgtacctcctcagtcgtgttataaatcatgaccaccattatgatttcccatcggagatccatgcggttctttctcgagtttgcatttatcgcatagggatgtctacatcttgcttcttggctgcacttggccccacgcctccagtcatgcacctgaattttgcatgaagcctccaagagagcagaagttctccgaccttccggggagcctgtactgacgtatgacgtaaaagagagtttgtgatatgaagggttgattttctcgcaaaaaaggcgaagggttgtttagaactttcttgaaagacattgaatggaaacatgctcggcctaacaacagcaaagatattcgcttttatttcctattttctttccccgataacattcttcaccaataataaagcggcttcgacatatcaccataggaggccggatctccgaagcttccaaatacgccacgcccagacaaatcatacacaacaaaagttccagtcaaatgatgaaagcgatagtggagctcgcgagatcaccgagccgtatgagaaggtatgatagggccttgcttctgaaaccgcattatctaacctccctaaacttcagattgtgtgcgctccattagaatacctgctctctattccagggaaagatatccggggcaaattgatatcagctttcaatgaatggctccatctgccggatgataaattggccattgtgaaagaagtgattgatcggctgcatacagcatcgctactgtgagttcaatcgggttgtactagaagccgcgctaaaacctatgcaggatagatgatattcaggacgcatctcatctccgtcggggacatcctgtggctcatgatgtctttggaatcgcccaaaccatcaatgcagccaactatgcatactttctacaacagaaaaggttgagtgagataaatgacccgcgcgcatttcctattttcactcaagcgctcttggatctgcacgtaggccaagggatggacctctactggcgtgacgcgctggtgtgccccacggaagcggaatacacccgtatggttatgtataaaaccggtggattgtttcgacttgcagtagaattgatgcaaattcaaagcactacaactacgtatgattagctcagtcgtacaatcccgaaactcttagctgacttgatctagggacctttcccgactcgtggagctattgggaatcatcttccagatccgggatgactatatgaatctgcagagcgggatttatgcaaagaaaaaaggattgatggaggacttaacagagggaaagttttcctatcctgtgattcatagcatccgtgcggttccaggcaacatgcaactcatcaatattctcaaacaacgcagtgaagacagagcagtcaaagtccgtgccgtgcagtacatggagtcaaccgggagttttcagtactgccgggaggtattgggagggttgatggagcaggcacgaagccatgttgacgagctggagatactcttggggcccaatcagggaattcgtcatattcttgatttacttgaggtctaaccaccagatgtgaatccaggtccatgagtccatgagtccatagttacatcctaaatgaacgcatggggtttttttcccaatcggcgatggtgaaccatggatattgctcatctattagcttacttgtatatccccatcatacagagctcgaagtccttttcgccgaactacctccagagctgcttgtacccacgcaatttcatgaccatgaccagcccgattccgtagactatcaagcacagtcccaagcgcgggactaacaggtaatgggccggctagcagcatgccatctttcagaaattattccacagattggcaaactcgatgtgccatagataagtagtctccacaaaggtcaatgggatttgatgtactcatcacttccgaagcagaaccttgatctaactcggtctcaagagccacccagctgaacttctcaaggtttgtgatcctttccaagtgctggtacatattggaaagactcgaccagagcatcgttcgcgttgcccataggagtatcagcgtagcagcgatctgggcgttttggaaacagagaacgactgggaacagattgctatcaggcgggatattacgggatatgcataatgtcaatactcgtacacggccatgatccgcacaacctatcaactacatattcacatagaaagcgacattggaatgaaagaaagtcgtattgctcatcttcgcaagcggagatatcgtttctttgtattttccccgcatttttgtgatcacgaaaccatttccggatctccacatgttaccaggaatcccttaccgagcattccgaaattccgagcatgtacgtactggtataagttggctgggagctgcaggtccccgggaaaaattaataaaaccctaacttcccttgtcatgtctcactctcatccacttagtattctctccatcgaggagaccaatttggcccgtgatgtggtcaaagctgctcacccaaacgtcgtgatcgactttcgggagatcttcctacaagaaccacccaaagctcagctccaggaatttctagctcttgaacatgccggccgcttaagcccaactaccccacggcctccacgtctcgctctatgccaatatgacgtgatcggggtggaccgcattcctcagttccacgaatctgtgatcgacgtggtttcacagtcacgagtgaaacacacggtggtggggagggaacatcatgccagtttgactctgtaagaaataattatagttgaacatccggagttttctaacagttgactaggagcgaatttgatgttctcgtcgataaatgcatgacatcaccattgttccagaaagcattgtcggaattcgatctccctgaagggttcgaggtcgtgattgagccatggccatatggtggcttggatcatacagatgaaaatcgtcgttttttccagggcctttgtttcgcccaggataaacgttctggcaatgaagactccaatttctattcgttccccttgcccattatccctgtgatggatgcccacacccaaaagatcacccgggtagatcgacccgccacaggcggcaatggtgatggtctacttgaacagactttcaagcgggatataattggtcattgcaagtcctccgaatacgtgccagagctgttgcccgaggggacccgcaaggatctcaaaccactgaatgtggtccagcctgagggtccgtccttccgagtcaccaacgagtctctggttgaatggcagaagtggcggtttcgtgttgcttttaatccgcgagagggtgcgaccattcacgatgtctcgtatgatggtcgtagcgtgatgcaccggctggcaatcagcgaaatggtaaattatatgctatcccaaacatatagctgggaactaattgtgcttcgcttgcttagaccgttccgtatgccgaccctcgaccccctttccatcggaaacaggcctttgactttggcgatggcggcggcggaaacatggctaacaacctctcactgggctgtgactgtctcggggtcattaaatatttcgacgccattgtcacccgggaagacggcaccgcccaaacccttccgaatgtgatttgtctccacgaacaggacaatggaattggatggaagcattccaactggcgtaccgggcgcgctgtcgtcacgcggaaccgggagcttgttgtccagtttattatcacactggccaactatgaatatatctttgcctataaattcgatcagtcgggtgggatcacagtcgaggcacgcgcaacaggtatattgaacgtggtcaatatcgacgctggtaaggtcagtgaatatggaaatgtggtgagcggtggtgttctcgctcagaaccaccagcacattttcaatatacgaatggatccagctatcgacggccccaacaactcagtggtcgtagaggaatctcactcagttccaatgaatgcggtgaccaaccccaatgggaacttctataaagtcaccaagcagaccatggagcgtgcatcttggatcgatgccgctccgcagctcaatcggaccatcaagatgatcaatccccacataacgaatcctatcagtggaaaccccgtgggatacaaattcattccactagccactcagactctattggccgatcctgcatcggtgcaggcgcgccgggctcaatttgctcaacaccacgtttgggtcacgaagtaccgcgacggggagctctatgctggaggtcgttatactttgcagagccaaacagaagtcgaaggtgtctctgatgctgtccttcgaggtgactctgttgttgacaccgacgtggtggtttggcactcctttggcattacccacaatcctcgtgtggaagattggcccgtgatgtatgttgatcgcatttttcttcttttcattctttcttcttcttttcattctaactcaataggcccgtcgagattttccagctcatgatccggcctgcggacttttttgtcgccaacccatcgctcgatgttccttccaacaagaatatatcgtcacgtctagctgactcggaatgctgtcgaaagtcgcatatttagctattatttaaaaagaaggacatagagatagagagagttttccctgattcgtgtatttctgcatcggcccgccccgcaatacccacctgtaaacaacatcgtcacagtgattgacctttgcccttgcattatttatgtaaccacaaccacaccaatcgtgccaagcgcccaaaacacaatggtgcgcaccagtcaacgataattttcactcaatgataaattcacgaaatcaggtaccttttatatggtatactaatacaaatagtacctaaagtccaagaatcttaatatcctttttctccaccaccctactaaggtaggggaataggtcttaacacgataattaagacagctttagtttatttgacatctatacggaatatcaggtatacaaaataataggattttcaaatttctgtataatatacatcgtccttctaaatatatttatcaaacttctataggtattaattatttggctttaatttagtgctagaacgacttgaccatgaactattatatattagtactcctatttgtctcttaataaattcaagggttgataaaaatggaaattatgatttttggactttggtaccatttgtattagcatactacgcaggtgtatagcggccaacagtcggatgcctgattttagcataccatacataccggcccgaattttacactgctgtagacatggttcgtcgctcagcaacccatgcccgtacttcccgaagattgcaaaaagttcttcacagtttgaaacggatttgattgaacctcaggtgggatagcgaagctggccgacaatcatctactcatcgaggtattcatcccccaaagacagattccaaggatgagaaagagacatctgagcttcatgcgcatgctgcgtctcaaagtaagttgtactcatcccacggtatttgggatccaacgccgatatcaaccacaacggagtctgctgctgcacgtacttccagccttcgtcaaatatctgaggctgctactcctcagctctcatctaacactttctggccaatgtcacctggtacagtggctggatctgaatctgaagtctgtgaagacctcagcagcttttttgaaatagccggtgaattctactttgaccctcaacctggatcgaatattgccgccggtgcagatgtgggattggcctccagatgacacgcgttcgcccaatgcgctgaacgcctttcatgccgaagatgaagcattgacgagagtcatggctggtttgctgtgaacattgtggaccttgttatgcataacggttcaataaattaagctatgagttcaacgatgagcgacttcggttcggttaaatacattgctatactcgaaattatgaaacatccctcgggtatttgcacttccgtttatccgtcacgaaatgactgttgtttcgaattgggattccccggaacttggcgtgcctttgcctatagttttcggcaattccaccagtcgctctaattcccacgactagttaatttccggaaggattttcttctttccgctttagactcttaccctcaggagcctagtatatttcccctctcttgtgtgttgtatccagactatcggatatgctagctgcagaagaagatctcacccgccggtgggggaaaacctcggatttccacgaatgatgcgtgccctcgccaaatactgtatacaaatatgtccaggcaagcccattaatgaagttttattgctcttcattcaacatacaaatcatctccctcgatgcattttggtaatatcatcaagccagtgcttttcgcggccctcgtgcacggatatgcaaaccctggcagttgttcaggggcgtgcaatgtgcacgacccgtcgttgatacaaagatcatcggacagtcgttatttccgattttccactggcaacaaaatttcttatgccagcgcctcatctatcaacggcccatggactacgattgggtccatcctgcctagtgggtcttctatcgatctcgccggaaatgatgacctatgggtaagcattaccctttccgcaaagcttgtccgcaagtgatcaacatattgggtactgacttccatgctaggctcccgatgcgcagcttgtgaatggtctttactatgtttattactctgtgtcgacgtttggttcacagaattcagcccttggactagccacatctgcaaccatggatttgggctcctggactgaccatggagcaactggtattgcttcgtcatctgccaaggcatataatgctattgatggcaatttgttcaatgctggtggtacttactatatgaatttcggctccttttggcacgatatctaccaggctccaatgaactcggatgccactaaagtcgcgtcttcgtcctacaatctggcttatgactcctctggaacacacgctgtggaggggtcctacatgtataagtatggaaactactactatctcttttactctgccggcatctgttgtggctacgacacatctcgccctgccagcggagcagaatacaagatcaaggtctgccgatcgacctcgcctactagcggatttgtatgttacccaatttcccgctttagacactcgccctaactcttttcctatccaaggttgatgcatcgggcactgcttgcacaagcgggggaggcacagttgttctagaaagccacgggacagtctatggtcctggtggacagtaagtttttgatttcgatcgtattccaaactcgaatattaacctgaccttgctccaggggcgtgtttaccgatcctagcctcggcccagtgctatactaccactatgttgacactactgtaggctatgccgatagtcagaaactctttgggtggaatcagatcgatttctcaagcggatggccagtggtttaagtgtgttggtgcctggtttttcaggccaggtactgttcttcccctttccttcctcttcctctctttgttctttctcctccagtcctctattagcttggaatacgatcgatgggttgactgggcttcttgctttctttcgtgggtaaagtagctttgcttggtttggtacatttgcaaccaaatgcgattgatgtaagtagtacagcattctaccactaaaccatagcgaacaacgggtatctgtttatcacatagggtgtatgctatcatggatttctcaatttgagataattcgttctaaaactgaagtttctaattcaaaaaaagcttacagtatgacacatcccggcgattttcgcactcggccgactggttctgccccaaggggttgccaacaaaatgagtctaaatttcctctcctcaagattattcgaagtattttttgaacttcataaatttcatttgctatggaaaagtcatctaaattaccctgcgccaaaacccaggtgaagtataacgcgggatggagacgcatcgtgcgaaatttcagtccgtcgtatggtctctcccccttcaaaaacgttaccggtttatgctgacagaaatatatagatggttcgcggtaactatgggcactggcattgtttcggtgttgatggtatcgatccctttcgatactccagtgctctattacttgtcgatcgtcttcttcctactcaatgcggtgttatttactctggctttcattacttccgtcctccgatacaccttatatcctgaaatatggcaggtgatgattcaagacccaaccaattcgctcttcttggggacaatcccgatgggcttcgctacactcattgagatgtgggtgttagtttgcgtgccaatctggggcgaatgggccaaaacatttgcatgggctttatggatgatcgacgtggtagcagcggcttctgtgacttcgtccctaaccttcattttgtaggtctacagtcctccacatgccaatttttaagatactgacatccgatcagaatgtctcagcgccatatcacctcgctagatcggttcactgcggtacaattattgccaatcgcagcgactattgtggcagcgggtaccggcgccgaggttgctcttatcttagcagacaagcaccatgcgatgggaacactcctcgcctcatttattctctggggtatgggcactccgatggccattgtggtattggtaatatactatcagcgactagcagtgcataagcttccaccgagggaactgattgtgagctgttttctaccactggggcctcttggctttggtgggttcgggtaagtgtcttgcagatttcccttgggcgccctaagactctgggctaatacgctgtcagcatcgtttacattgggaaggtagcacgggtattgtcgcaggattcccagttcctcgaccctatcgcaggccacattgcatatgtcttgggtgtcttcatatccctcctcatgtggagcttcggcttgatttggctcgtatttgccctagctaccgttctatacagctctccgtttcctttcaacatgggttggtggggatttacgttcccacttggggtgtattccgcaaacactatagagttgggccttgaaatggacatcatgttcttcaaagtcctcggtaccgtatgtccatcctgtttttttttcgttttccgctcttcaaataaatgataggtactaacttattatttgaagatcctcagtggcgcagtgttgctattatgggtgttggttgcatcgcgaactgtacacggagcatggcgcggaaccctattttatgctccatgcctacaaaacctggcaataaaggaagagggggctgagcgagatgaagatcggcatcgggcgtaagacgaaaacattggtgaagtctctcattaccaagcctccaaacactccaccaatagaacaatgcgtatgcccaggtctgatccccagatgtaatgtatcgcgccggagaaccccgctgacggggtcttctgtacctgctgtcgtggccagtgaaggggaagcctagaagtactccgtatagcttaggcaatttttgccgaactcgatatctcgattcattggtcggacctagggtgattaccttgattacccccaaatgtttacggggtacgatgtattcatccatgccaagcactacctatcaggcgagtagtcacatgttcagcccgtcagcttcgtgttgttcgctttttccactctcttcttggattatggtcttttgtgataccggaggccgttttcttgactctttgctattcaaataagtctttcacggtagcgcttgagtattgagaatggtaaggcttgggttctatctatacagatctatggccaagcacaactctaagtgaagtctaggatacgggggagtacgagtttcccttcttgcaggaggtcttctctcctcgtgaatcgcacaagatcgagtatgaatactagggccctatattttatacggaaattatttctaagacctgttctttagttttgtcttcgttcatggcctgaacccaagcggtcgcaatgaccatcctttccagacatggacgcatagcaatggcaagttttggccgagggacttcctggccgaggacataccctatgcgcgcgtcttcgtttacggatacaattcaagcatcacccatccacagaccatgtctacggctagcatcaaggaccatgcgaatacgctgttgaatttattggatatggaacgcggccctcagatggtaaatcgtgggacccaacaagcttcatttgaataatcaattaacgtatcacagggatctgttccaccgaaagtgatattcatcggacatagtttgggggggttagtgatcaaacaggtcagatatatatcccatgaccttttcctatggcatcttcctgacagtctatgaatcaacggtataggcactgctcaatgctaaagaagatccaaaatatacctctattcgttcggcaacttctggtctcgtcttcttcggtacacctcatcgtggagcgaaggctgtggaactagggaaaattgcagcccgggttgctcgctttgtctccaaaggccatgctagcaatgaccttctaaactgcctggaattcaattccctttttactcgacagatgaccgatcggttccgacatcaactggaagattatcgtgttgttagctttatcgaagggaaggaggtgcagatagggggagttggaccagcatctatcagccatgtaagcagattttccttcactaattatgtgttcccccggtccccgtatacttttgtcctggaagagtgactgatattgaaaagcttgtggttgatgaagagtctgcggttcttgggctgtctggtttacgcgaaacccaactcaagctcgacgcagatcactcgcagatgtgcaaggtgggctctcggggtccgatgtaccgtttgataaaaggcaatatcaaacaactggtcgatcaggcgcttctgtctgagcaaggctttattccaccatcgataccttcaagtaccgcgtcatccccaccgccagtcccaccacgccttcattcaaatagtagcacgccataccatgggcagagtcgcccatctccatcgacacaaagggtgacaggaatgattttcaacgctctggataatgacccacggtctgttcgctccgcagaactcaaaaatcgggctcgatgggacgaagcccgaaccgtcgaatatgggattttccaggagcatttgcgcagccttggtccggatcatttcagtacactatcagtggcatacaatttagctgaggtggaaatggagtctagctacttagataaagcaaatgaatggtgccattgggtgtccggaaatgcccaacgcgtctttgggacaaaacatcccctggcaatgaagacggaaagtttgactgcagaggtcttgtgtcaacaaggcaagtaccaagaggccgagtcggtctgcgccaacgtgttagcccgtcagcaaatgactatcggcgaagatcacctagacacctgacactcggcgccgattgggaatgacctacaatggactaggtcgccgggaaaatgccgttatgactgcggagaagctgacagacaccctaaagcgtcttcttggagaaacccacattcgtgtatttgtcattgcgttggatgctttgtgtcagaatctaggatgaatactgttatttttcattcctgatacagttgggtcacgtgactgaccaggctggtatttctgcagaaaaaccagtcccacagtttttcgcccgaaaaacatcctttcattttgttttgtttgttttgattactaagttgtccacaagatgttagagaatttattgagatttttctgccacacatacattcgccttaccaccgtttttccgtcactttggaatacatcgtgagcaaccattctgggaacgaaaatgccctaattgtgatgcgttttcaacccgatgtacaacaagcagtggggatatcgttacaggtctaccaagagcttcgtaatgccttgggtcatggacacccggctaccattcgcgctctctgtctccacggccgagcacaaaactttatgcagcagagtatagaggcctcagagacactgcgccgggctttggccagtgccgaagaaacgttaggacccgatcatccgctgacattagaaatcgtgggcaacattggcattatgtacgctgcgcaaaatagctatgctcaaggtttactcagcaacagtcccgctgcggaagccttcccctggctgatacgatatttgaactgggttgaacagcgcaaaggcaaaaacaaccccgaagcgcaagccactttggagcttctggccagtctacatttcaacgctagagagtacgaacccgcccagaattactatgagcgcctcgtggcgaatattcgcggggccgactcagcaatgaccgagcgcgtcaacactcggcttcaactgtgccgggcgaacaccatgtacacccgtcggggcctaggatcgggactaggagggtttttgtccagcttgcagcgatactgacgtggttttatgattattatacctggatatacaacttcgctttatgaattcaatgggatctttgtcattattcagtcgtattcagtgtgatacatctaagtatgctcatgatccgtgaagggacatcatttgccttttgaattttatacacgatgagtggatcagccgatcatcataaggcgtttaatgtgtcaacttgttggggatgctctttctgtatatgtaatcaatactgattccctccattatgatccgcatggaaatcatacctagccttatccaactgctcatggccggcattgctgagcttcttcgcagggtcaaacttgtcagcaccgatcttcttctccgtggtgtgaatacctattcttgttaacttgaagtcttaaggcgcgagaatagacatcgaagctcacccttatcaatgtattcttggcccttattgcctccgagcttgttagcgataccagagactttgtccattgtgaaagagtgatgattgtggtagaaaaattgtaacgggttactgtaaaagagtaaaaagcaactctagataatgaacgaccctttatagggatctatagagtcaattactatgtactacgcatttcgtattatgcttaactctgtctatgataatgattcgctttggcatagaacgctatcgtcattgccgcactcttaaatgtgaatttgcccccgcaggtctcagtatctagtcatctttattggcataccgcttccagataggctcagatctgaggtcatattgatgatctcgatcttgccatggtagatctagtccgttgtctaacggcgatattgcatatcgtgacgtcagcgagcaactatcagattatcaggcattagttgacaccctcattatgaggcattaaggcatacaggcaccaatagctatataccgaggagcccttgctttcacggcgcttctccgatctctcagttatacaaccggctatcaatattcttgttcaaccttgtgcggtattctttttacacccttcttgtatatttgttacaacgataagctcacacaaaaatgtcgcatagatggctctgcaatctatcaaccagactaacaacaatttcatcaaaagcatcatggagatattgaatattcggctgtgggcaacactcggtgcgagctaccccgaacctaattgcttccccgcgtttgatcaaagtcaaaacaaacccccatactatacagcagccaatgagacaacccaaacgtcagatgtcaggcaatttttccaagtgctattgacagagctccacttgatatgtctatttaatttcttaccccggaggttcttggtcaaaccctcggagatgtgccgatgcgccgaattagccaagtaggatgcgcgtgatccgatttctttataacctatggcctcctctaagaccccgggaggggagcgtttctcgtgttaaatatatacccggtcttacaagaaacaaagaaatgggaaatccagcagaggaatgggagaaacccgatagcaagggccttgccttcgaacaaaatgctctttaccatgcttatgcttctaaaagcccagaatggcatcgagatatgaccaagcgtctacttcacaaggttgactggcaccttttacccttccttattctcatgtatttgttaaactttctggacagaaagtaggtgaccctgtttacagcagctatacatgatcacgaatcctaatagcttcttttagcaatttatcacaggctcgcctaggtacacttgaagaagacctcgacatggaaggcaccgattacaatctcgccacaagtatcttattcatcggctatctactgatgcaactaccatccaatctactcctaacccgtgttcggccttcgctgtttctgggtattgcaatggctatctggtatgacatatttcaatgagaccgacaagcgttagaatgcttaatttatttcacaggggtgtgatatccgcttgccaggcagccgttcagtcatttcccggactcattgcgacgcggttcttcctcggatttgtcgaggcgccttttttcccaggtgctgtcatgttaatgtgagttactataaataaaaaagaagtgtgtctgaggaggttctgacatttactttgtataggtcgagctggtatacacgacaggaggtaattcaatacgccctgtaaaatgacgaagcataaaatctaacttactcgcttagttgagtcatcgtattgcatggttctatgctggcagctcgttagccaatgctttcggtggtcttatcggggcaggtgtgctaggtaatcttgatggcgcgcatggcatcgccggatggagatggctattcatcatcgagggatgtatcacagtgggaatatccctgctcgcggcgtgagtcttttctgtgcttgatacgtacattattatgtctccagactgactctcagtagtatctttcttccaaattatccagcttcgactccctggttagacgaacaaaaacaagcatatgcgcagtggcgcctaatgcatgatgcaggagaagctgacgaggtcagctcaactagtatcaaagatgccctaggtctggtatttgcggacaagcgtatttaccttttcatcttgcttcagcatgtctcgctcctgtcgcaaaacttccaatacttcttcccgactattgtgcagaccctcggatatgggaaagtcgaaacccttctgatcaccgcgcctgtatggattgctacgttctttgtctcgctgctggtgacatggtcatctggtaaaaccaacgatcgcagcctacatatcatctgcttgatgatggtcagcatggtaggaggtgtgattgccactgctaccactaaccttggcgccaaattcttcgccatgttcctgtaagtcctatggttccgttatttttcgcatgtctaacagtaatcaggatgcccatgggagctgtgtctgcatatcaaatcatcatcgcctgggttgccaattccttcccccggccgctggttaaacgctctgcggcaatcgctattgcaaatatgattggaaataccgcttctatctatggtagttacatgtggccatcatcttcgggacctcgatacattccaggaggaagcgcgaccgctgcgatagcactctttgtggcgttggtcgctctagtcattcgcctggtgcatattcgcatgaacaaaaggctggatgagactgagtcatcacgagatattatttcgtccaatacaaacgatctagaaacccgggctgttgggttccggtatattctatgatcccgtatttggggtttgttcttacacactctaaaaagacatggaagacatataatggattggcaatttcaactataaagcacacataagtatataaaagtagatatagggctccttttaacgtccgaagagcggggttggcatccttcgattagaaccgtccacattcgccatcacagtccaatcaaaagagaccttggattgtttcctcttcgttttccactccgaaatcactacacttcatcttcaacttcctcttctcatttcaaaatggtatgatctatatcccaccgtgtgatcctttgaattaggctgattttgcaagtcgggttcatcatctttcacttcaatccctattctggatttctctcaagcgctatccccatctaaacccgccttcctagcaagccttcgcgacgccctagtgaatgttggctttttctatcttcgaaatgctccgatttcggaccaaacccaagatcggtttatagaaaaggccctaggtctttttgaactaccactagagaaaaagcttgaaatcgaaatggtcaatagtccgcactttttgggctactcaaggcttggtgcagaaattacggctttgaaacctgattatcgtgaacaattcgatgtaagcttgggctgtattgtttcttcggatatctatgaacacttttgtcagttcgcaaccgaactccctgcacctggtccagacgagcctttatacaggaatgtcgttggtcctaaccaggtaagatcttatatttggtctttgtgtccgtcaatgctcataaagaattctgccagtggccggatgaaacggcaatccccggatttcgggaatctctcgacacatatctgtctgaagtgagcaacctagcggagttgttcccaggattgattgcagaggccttagaccttccatcaactgcattcgatcaggtctttgatactccccagcaacacaaactgaagttgatcaaataccctcccccacctgcaactagcaatgaggattccggatttcaaggtgttggtcctcacaaagattccggattcctcacattccttttgcagggtacacctcaccatggcctcgaggtccaaaataaggctgggacatggatccccgcgccgccactcccgggaacgttggttattaacattggccgctccctggaggcgctgactgggggtatctgcacggcaacgactcatcgggtaagcttacggcaggagaacttccaagacaatgggagtaatctagggtctaggttttccttcccggttttccagggagtgagtctcgatctttctgccgagaagatctctttggatattccagctcatatccgtgccttggtggaaaatgacaaggtcaaatcagatgcagaggcaacttttaacgaaatattccgtgggtgcattggcgagggaaccttcattgctcgggtgaccagtcaccaagatgttgggcagcgatggtatccggaagtcttgatgaaagcattgaagggtcagaaggatttccttagctgattgctgatataatatctatgatatgtctcgagatgattgcatttgcatatgcctacctaggtgactctacgtagtgtttttcctctgccgggtggggctttcctatcttggctagctacagtgacacagcaaaagtcttagcaccccaaattctgccggtcaaatacccaccaattaaaaatgaggcagaacgagcggtatcacaaaatcagaaggcggtctattcaattaagaaggcggtagcagaaggggtgttcagacttttgctgcgtcactgtacctcaagtatagtaattgatggttggagtcgttgacgacagatcaaggcaattattctggctttcatcaccacgcagattctcgctatcaaaaacattcctgtttctcacagcatactgttcaactgtagctttcactaaaactcatgcagaatcacatttcataattatcgtcgttgacgctcaccaccgaggcaggtaccttcccctaagattttgtcgtgagctgtgccctttccttgcccacttcattcttccaactccctcgttcaaagcccgcaaatcacttgttgcccacagccatgacatccctgtttactgatgtcgccgaaagtgctattgggctccgcagaatgtcccaaagcggcgcggttgtccctgctcgtccttccctgctgcagggtctccccgctggatacgctgtgcgggttttttcccaactcgagcgactccaagccgacgcggggaggatcctacagttgctccaagaaaataaagatggaaaccagtggctcgttgtcctcggtctgtcgacatcaacaatccgaaaattggacgacgaccacagtagtctgggaggcgtggaataccgcttccagtgggaaggatctacaggcgtcatcaaggtggtcccatctcatacccacgacatgaccacagatcaggtcaccaggtccatcgacgacagactttctgcaatgagaatccgttccactaataggaagtgggctgcaacttccacctacaaacccacccccaccaaaggcaagcagggcgatcaagcttttattccaccatctcggtgcccttccccccagcgacccgcgggctggcccacctttgttatcgagactggtgtgtccgagtccctccctcgactccgggaagacgcgaagtggtggctcgccgcttcgagtggggatgtgcggatcgtactcgttatcagtatcaagaggaccagcgtctactttgaaaaatggcaattggctccatcgaatgctccgcgccctctcacccgggcctacatcgataccctacgccttcaaggcccccacataccccctctcttccagcagccagcaacgatccagcaagcatactctgcacacgaagttgaggtaacccccactgggattgaggggactcctatgattctcccgtttgctgcgttgtatgaccgagaccccggacgtggggaagttgatgttgtcctcgatcctcaagactttcgggacatcaccagtatcctattttaacacctgttagttttgctacatggttggttaactgtttacctcgtctccaccttgctgtgatgacaaatttgtaccacacaggtgcgttcccaacatgctaggcccatatcattatccacactacagggcctagtatcaatcttccttctccaatatcgccttccagttgtcacgctccgagccgagcttaatcagctgggacccttctttagctagttaactaactatggtatcaccatgaaccttttcagagatcacctgatctggcttacttgctcaatttactcgcttactgtgtgcattgtttacattagatagattgtttgctgaattgctaagcaagatatttgaagtttgcactgtttgcaaagggatagctatatcaaatatttggttagtgtacagctaactaaactccaacaagggttgcgagtcggcaaacgcgcgcgaccatgacctgatgcttttcacttcaagctcaatacaaccaacactaaagcgagccgggaaatactgtaaagaatggttcttcattgctagggatgaaacttcaggcactgtacggtgatttaacgttgagtcaatcatagcggagatggttagaacaaaatacatggccctttcattgccgattgaatatctcccatgcaccacaaagcctcaattttagacgaacgtgaaaattcgacagccagccaaccaaaaatatcgctccatagtaatggatagttattctgtggcggagcgattgtttctgtctgacatttgcggcatcgattgctgtctgatattcaaggccgctatgaactgtcggtgttccgtattgtgtaatgtatgggtctaatcaatggtattcgactctctgtattgcactattctggcaatttatactaccatgattacataaggaatattacagcattggtaggattaataaatcttccgatataccggcgtatctacgccgagatgaacgcgcggcggctggataacttcttcgtgatagattagacctcgccacggcccacgtagcccatgcgcgggcaggtcaatggttcagcccgcccgtaagccgcccatcaaccgcccatcagcgcacaatgttcccaaataggatgtatgaatcgctcattctcgatatcacagctcccatataaccatggcggtctgagttggtcaaaacttgagagaagatgtattgaaatgacgggttataacgctagagccctaccacacggtgacttgtcatgtggttttttgttaacacctcagcttagctttcagatccgcgggcgaagagtccagaagaatctcgcgtaaggcgcccgcgtttcattgcgtttttcggggattcttcttctgaactaagctgttcagggggggtctgagctcgacgacgctttcgcgtacctggtgacaatggctcatcgacgccttggtctagtagctgtttctcatgttctgcttcggcagacgaaagaaagtcacagagctccctcgatgagatatggatatcttgatcgagattggggtatttctgtgagatgctcttaggggcaaagtccctgagtgaaagctggagcgctggttgtttagaatcatcgactggaagtccagactccgttcgaaaaggctgcaaatcgtcggttagtgctaaaatttcttgggactgcggctgaaaaggaacgtaccatcatatcgatcacagcctttgcttcgagttccttcaccccatccacggttattttgtgcggtcgccaaatggatatagtcgcctttttagaccctctatattcaatattgagggcaatcacagcgttcacgctcgtattagtgtcgaggatgtaatcatctgctaagtccgcagcagctcgaactttttgtgaatagcacacttctatgataacaccgggatatttggcatattcgtgtataaatgatgcatctgggcatcgttcggaataagtctgctctgtatcatttatatcattcggcagccggattctggatgtcgataaatgtttggtctttctcgcaaaatcaccgaaggcttcatcactcttttgcaactctgtcaatcgattcaaaattttagagactacctcggcacaaaacaaatcatgtagaggactcggcattcggatagtaagacgggaccgtctggggtcgtaatcgagcctataatacaactcaacaaacatgccttcaatgcgcctgaagatggacagtacttaccgtattttgtcttctacgtaacctcgaagagattcgtcaccatccagtacacgtaaaacctccgtatattggtccggagtgagccggtgttgccaccaagattgtggccgtcgacctttacggtggagtttgaaatagttcagcacgctttgtgcactagttgacaacttcttctcttctgagggcgggggtgtagggggagtattcacaaaactcccagttggtgtggttttcttctccatgaggtctgattctgattcaggcgacatccttggggtacggtttgtttatgtcgcagagaaggggctaagcgccggatgagttgaggtgtcacgtgatgacgtggttgcagggatgtcgtgtacaacgtaaccgccttggagggcccctattaggtgtgtcccaccagtgcgatgaggtccacccaggcgtcgagcaggcctatcgagttggttctgggggagaagtgcaagtgtcaaggcgtaaacaacctcgtcagtgattttaggctcaatgttgagctgaatggtcagtgcggtggctggagcctgacactgttgttttcttttttctcgatctttctatcgacttcgacgtgccacgacactcattaattagcttcaaatgatgtttctcaattcccaaatggccagttcatatatcattgagccctcatgtttggatgctctttcgaaccccaaataatgatgttaagcaaaaaggcgacccatcgaggttacataatggtcaggtgatgctcagtgaagtggacgtgtttgatgattatgtaatgcccaggggcgtgctcagttctactcagtgagcaaaaagcggcaaggactgagcactaaaacggaaagggaaagccaagaagtggtagaggaaatctactactccgtacataggctgggattagatgacctccggagattggtgagaggaatggggatcgggatattgagcaagagtgagactctcagtggctgtaaatttaagaccttgagagaatatatattctgtcacaaatgagggaaatgtaaggagaaccttggaagttcattcaagatcgtgatcaaaggggccaatgcccaaatgtcttggcggatctccaattcccatttctctccacatctctcttcttctctccacacctcctcttatccaagatgccacgcgccgtccgaggtcagctccttttgttttctgcttttaagatctcttgctaacattttgtgtccttggtaggtctgctgatcgaatgcgatccctcgatcaagtcaatgatcctgaagtacgacgaagagcgacatgactacatagtggaggatttggatgacgagaaccacctggtcatcaaagagagccagttgcagaacctcaaggttcgcctagatcaggtacctactgcaccctagctattgccgggctatccgaggactgttactcatagactcgccaggaccttgacgaaaagatcatgcagctggatgaatccggatccgaataaggctgtaaccaggtatttctcaatgaagacgaggcctacacacgcgacgcagaggcaaccggtcaccatatccaagtccataacgcacccgccaaacaccatctcccaccgcttgttacgaaagatcgcatcatgacttcacccgtttacaatggttgaatgcagtccgaccgcccctctcaatcacccgccctttctccgaccgataaggcttggccactgtcaatgatagtgtgggggctgttttcaggcagcgcaagagaggtcggagattgtgcaactcatcgaggcttgtcatacttcacggtgctgtacatcccagctccgggccgtgctggctagtaatactcttgcaatgaatggaggcgtgtggcgtgatcgaatgttagcgaagcacatcatccaaaccatcggagaaacccttactccgacaggcataaccatggaccccgtatatagtgtagatgtcactatctagtgccacattctgctacacactcattggcacattggcacatacactgtaatcagtcaattacgtcttattgcataagacaacagtcgcgaccgtcgactgatgtcaacaccggttacacggcaatgctagagacagcgtctttgtgttccttttctgtgtaagggcacctggtttcgagtgcatcatggctatataagtcccttatgaacgcccgggacatccagcttccctctcatgagacataacccgcaaatatcagcttcaatataaaatcacgtctttcaagtcacccaacttccaactcacaacatgtctgttctccgtaccaacttccccggctctggcgacttcgcccccctcttccgtcttctggacgactacgatgaccaccgctctgcccgcaaccaggctgcagttcgctcgttctctcctcgcttcgacgtccgtgagagtgaaggggcatatcacttcgatggtgaactgcctggcatctctcaaaaggacatcgatattgagttctccgacccccagactctggttgtcaagggccgcactgaacgcgactacgaagacgtcgagccgccagaggaaaaggaaggctctaaggacgacgaaaccaagtccactcaccggttctgggctagcgagcgctcggtcggatcgttccagcgcgtcttcaccttcccgactcctgtcgaccagcacaatgtcaaggccagcctgaagaacggcattctttccatcaacgtgcccaagtccactgctgcttcttccaagaagatcaccattgagtgaacagtcacacccgtcacataaacgagccagaactatctttggcaatcgtattgcatgggaatcggacttaattggtctggggctattcaactcagaatgtattagtctatcttgattcaaattccatattgttctattttttttttggatattccttatgctccggggcctcggcacatgcaaatcctatgatacgcaaaatgcaatattaagataaaacagaattgaatcactttgatcacatcaactacttcaacaactacttcaactgcttcttcaaatacacgtttttgtctgatcaaaggtcgggttttctgactagatcaaagtagaagtagaattagaatcaagcctagcagaattaaattaatgccttatgttcaatggcaataaggtcttgactcgtgaagcagacgttactgtgacatcatcataacacttccattcaggaacagaataataataagactcaatgatcatactcctcaaagaccacagttttactaaaacagaaaatgtatgagtatcaaagcgagggtattgtgtcggaggaaggtgccaatccgttcctcgagcaccttccctttgatacgcccgtctacagttacgatcgacagtgcgctatagagagtctcttccctccatgttcaggttcagtcgaggatcgcttcgtcgttttgaaaaatttccctccagacgcattctcccagcacgaagaattaccgcggctttgcgattattcgccattatttcggatccttatcatcaaaatgccgggtggaccacatgaagacgcggccctccaatttaactacttgattatgacactcgccgagaatatgagcgtccgcagactggtcaggccgtggggatccaccagagtcgataccccggaccggcgaaaacaggcagacagcggatgggggccaagagggccaccgagacaattcccaaccgtagccctcgaagttggcttcaccgagaccacagcaaaattagagaacgatatcgcctggtggatcaacgggtcagatggtgatgtgacaatgggaatcactgtcgatatcaaaggttcgggctctattgaaatcaaaacctggaccccaggttctgagccgccatcccacccgaactacaccacagcaagcggtcgccatgtggtcgaccaaggtacttatgatccgcctccacctcgagtcgccgagagggtcctccttaagagggggcgtaatggcgctccttctacaacggaagggaacggtataaccataccattccgtgatttgctgttgtccgaaccaggacaaggcgagagcgatttcgtcctgacctcccaaatgttacttgaagaggtgggagaacccgtttgggatacaatggaccaggtcgagcggaccaaggcctcgaagagaagttaggatggttgtcacgttttgccgaggtcccccgctgtgtaatcacagccctttgatactccgtggctctctttctctccctcaaaccaaactccaaaaaaacattcatcgttctccctcgaaacatggctgaaaactactctttcaaatatttcaccgttaaatttcccaccgaccatcaatatgtggcccacgtggaaatcaaccgtccggaaaggttgaacgccttcatcgaagtgtaagcgctagttcccccagacttactgtacatatctttaacaaatcaaaatcagtatgtgggaaaacatggccaagatcttcaataaactttcctcagaccctcacgtgcgcgcagtcgttctcagcggcgctggagcgaaggcattcaccacagggctggacgtcaaagcagcctcggagggtctcctatcatcagacgacaccaagaccgacccagcccgaaaggcagtcgcgttccgtcgccacatcagcgccttccaggactgcatcacggcagtagagcgctgtgaaaagcccgtcgtggttgctctccacgggttctcattgggactcggtattgacctatccacggcgactgacgtgcgtctctgcgcccaggatacccggttcggcgtcaaagaagtcgatatcgggctcgcggcagacatcggtacgctcagccgtctgcccaaggtggtcgggaattacggatgggtcaaggaggtggcgctgacggcgcgcgagttcggcgctgaggaggcgctccgtgtgggcttcgttaatgcggtgtatgatacccgtgaagctactatcgtggctgcgttgaagctcgcatccctcattgctagcaagagccctgtcgctgtgcaaggtactaaggagatcttgaactattcgcgcgaccactctgtgcaggatggactgcgctacacgagtgtgtggaatagcgctgctttgcagacgcaggatgtctcggcggctttgctgtctgggttgcaaaagcgtactccgacattcgagaagttgtagtgacaaattcacccatgcccactgtatataaggtcaaaacatctagtctgctaatattgaatgtcatcattttttacagaaactcaaaacccccgtgcgtttgccaaggaatgccaatatcatcacatttgacgtgacacatacggagttatcccgtacacatgaaactgtttcagggtaaatttccggcattttatccaaaagccttgttatttcaagtccgtgtctgagtttccatgaatcagaagcatcgatcaactggtcgatcaacgggtctccgcattccagccctccccttttctccgaagtaaaactcgagagcccactgaggatgtcactttttccacgtatccaagccattgctgaacatggcaaaatgtataatttcgaagaaactgccaattctatagagaaaattcagtctgactttccttttcactaaaaaattcgccctattcctctcgccatgaaatctgctattcttctctccgcgttcatccctagtgcgctgggtgcgaccatctacctcgctggtgactcaactatggcaaagggtgggactggatctggcacagcgggtacgtgttttccttgaagcttccggatagcatcatgctaatactcccaggttggggtgaatacgttacgccctatacctcactcaccgtgtccaatcaagctgtcgccggccgcagcgcacggtcatacacgcgtgaaggtcggttcgatgcaattgcagcagtggttcaatcaggagattgggtgatcatcgagttcggccacaacgacggtggctctttgactcccaccgacaacgggcgcaccgattgttccggcacaggaagcgagacttgtagcacaacctacgacggggtcgccgagacagtgttgacgttcccggcatatgtcgagaatgccaccaaggtgttcaaggccaagggcgcgaatgtgatcatctcgagccaaacacccaacaacccctgggaaactggaaccttcacttatgccccctcgcggtttgtgggctatgcgcaggtggcagctgcagccgccggagtgccctatgttgaccacggggcctatgtggccgaccagttccagacgctgggcctgactgctgtcgatgcgtacttccccttggaccacacgcacaccagtcctaccggtgcatcggtagtggcccaggcctttttcaaggctgtggtttgtggtgatgttgcgctgaagagttccctgagcaccacctctttccctggttcgtgtctctaaacgaacagcagagtagcaagtacggacccgtgcaatctgagcttattttgtgactatgattgcgctgcctgtagagagagataacagaagattgcgtggcttcggctggacaactatatccaagagaaattgtagattgggttccagcccaatctggctcatgagcaggtaaatccgtaaggtttcgcaacaaggcaggaacactgagatgtaaagctctcgttgggaatcccagtaggttcaatttcattcctccagaatagaccgaacgatgccccggttttcgactcggtgataatattgattcacgttcacgaaacgagcatcaagggcaccctgggtctgtacaatatcgcgcagaactggccatagagagcaatcgtcgatggtaaacacggagcctcctaggtaatgttttccctgcagagtacactcccaatcctcaatcccgtattcaaacccactggctggattggtggcacagtgccgacgccagcgtgccagaaactggtcgatctttggcaataaactgcccccgcgtaacgaatccacgcctggccgtaaggtctcagtggatcggttagccatgtgcgctaggataacggagtcgcccgcgattatttctccatcacccgtttcatatattggcagtgtcgttggatcactatctctagctcccagttgctcatggttggtgatcaattgataccggacgccgttttcccccagacagagacgaacacgcaaattggccacgagatcacagccaagtaataattgacctgttgctgtagtcacaaagttgaccacgtcaaagccttcaccgtagacggcatcccaatcgaattcggtggcacgattttcctggccaaaagcaccaatgagacgtgcagttgcagcaggatccccatggaccacagcgcgggtgtgatccaatttcttactaacagccccttgtccccagattgtgttggccacagggtcgatgaaagtgccaatatgacggaaagtaagggaaatgcgctggccgccgtaggcttgctcctcggcagatttagttggattgggccgtttgtcggcccggattccatgaagccatcgcatgtttgtctttgggccaagaacgaaaagtgacccgtgaggaagaggcacgcgctgcgttgtccgacatggttcattttctccatcaggctcagatgccgaggtcttggtacggagaaccatcacgcgctcggcgcctagactgacgttgcagatgaaagaccctcgcacaatatccagcgtcttatctgagtgctctgatatacgatcctgtccatcacggtaaagctgaataagcacatgattcaaggggtggcctagtattcgctcgacagctatgcggacttcatcaaccgcggaggtaaatggcttgaagggtggagactcgtctgccggatgacggtatatgggtatggctccatcgggtcgaggttgaccttggactgcgaccaatcggggaacctgacccgacagatggtacatcttctgccaatctacctcggcatgtatacgctcaaaggagtctgcggccaagttgagattgttcacgaggcgcgagtcgccctccccgacgttattttgggatgtggttggtatctccgcgcattttgaaggtgttatcgtcccatcggggtcagcccgaggtctggctgaaggttcttttggaccttcccggcgcttcggacgacgggcacgcacgcggaccttcttttgatcttctactggaccccgcgcctgcgcagcagtagcgcgctgtgcgcgagaagaacgagcaggttcggggccatctgtgggagaggtgtccgcagtattccagaattccagaccatccatgacgctctcgagaccagcagtagcggctgacctcttagactgcggtgcgccttggcgggcaattgtctcagtctcatcccaatctagctcctgaatgagctcccgagcggtgataccagtcgctcccaagatatctgccatacgtcgcattgcttcttgatgccgctgaaaatcgcggaaacccaagcaatcctccacaagagttactgaaaacccgttgcggacagcatccaaagcggtcgcaaacacagagacattggacaacgagccacaaagatacaactcggtcacaaagtgtgtcctgaaggatagcacaaggccgggggactccagggcggagtaacctgttttgtcgactacaatgtcatgctgggcgttgatagcggccagaatcggtgcggggaactgatatcccggggtatgcggatcacagcatagcgaagagtcggcggagagaaaagcttcctggtcaacgggttctggagaatcatggtccgacgcaacttcaattatatccgaggtgggcatctcctttctgcggggtggctctctgtctagcacaatgcgatcaccaaagttccagtcgacgatagtctgaggggattcatatcgtgagcgcacccaaactacatcgccgactcgacggaatgcagatgccagctgtggaagggtctcgaggatatctggtgtattgaagacatgtaaagccccggacggacggacaaagtcattttgaaagtcaagtagtaacaaggcctttcgggtctggatggtgggcagatccccgaatgagaagacactcatcgtatagacatggtacgcccaggactaattggacagaccaaacaataccagtggatatgaggatatgcagagagaggggaggggcggagagcctggaggcctgaggcagaaatggtactttggaaggaacgatcgtcgaaaaagtcgaggcaggtacgaatcacgtgtacgaatataaaaaacatagaaagtctggaccctcacggcctcacgttgatattctgctatttccggagatcacgcctactccgggggagatatcggccagcccatgagacgaaccgtaaaacaatctaagacaatgagcctatctacggagtaccgagtatgcgctggtcgcactgggaaacgcaattcatgacataataaattcctatcctccaatcaggacacccgccggtgtcggtgtggatctccggggagcaaggtctgctctccggtaattttctacggtgactcgaatcgcccagcatatttgcccattatttaaattcccaagcttccccatccaacttcttcttttccacactctcctctcctccatatcttcacaatggcttctcgtggtcttccccgtgccctccgcctcgcccgcgtggccgctcctcgctcggtcattaccgcagcccttcctcgccctgtcatcgctgccgctgccgctatcccccgtgtctcctcggccgtcacctccgtccgtggtatcaagaccattgacttcgccggtgtcaaggaggacgtctacgagcgtgccgattggccccaggagaagctccaggagtacttcaagaacgacacccttgccctcatcggttacggctcccagggtcacggccaaggtctgaacctccgtgaccagggtctcaacgttatcgtcggtgtccgcaaggatggtgcctcatggaaggaggccatccaggacggctgggtccccggcaagaacctgttcgatgtgaccaccgccattgagaagggtaccattatcatgaacctgctctccgatgccgcccagtccgagacctggcccactatcaagcccctcctcaccaagggcaagactctctacttctcccacggtttctcccccgtcttcaaggacctcaccaaggtcgaggtgcccaaggacatcgatgtcatcctcgttgcccccaagggttccggccgtaccgttcgcactctcttccgtgagggccgcggtatcaactcctccatcgccgtcttccaggacgtcaccggccacgccaaggagcgcgccatcgccatgggtgttgccgtcggttccggctacctctatgagaccacctttgaaaaggaggtctactctgacctctacggagagcgtggctgccttatgggcggtatccacggtatgttcctcgcccagtacgaggttctccgtgagcgtggccacagcccctccgaggccttcaacgagaccgttgaggaagccacccagtccctgtaccccctcatcggtggtaacggtatggactggatgtacgctgcctgctccaccaccgcccgtcgcggtgccattgactggtccagccgcttcaaggacaccctgaagcccgtcttcaacgacctctacgacagcgtccacaacggcactgagacccagcgctcgctcgactacaactcgcagcccgactaccgcgagaagtacgagaaggagatgcaggagatccgcgatctcgagatctggcgcgccggcaaggctgtccgctctctccgccccgagaaccagaaataaataataccttgatacccgtgggggtgcaaaaaatgatgatgtactatgaactgtgttttttgggtttcaggtcgaaaatattattttgaggctttaccggccattccccagttactttcttttccattccgtagcttctagattgtttctggcggctcacacctgcagctgtagatcaatagacgccgaagcccggagaagaatccggggtaagataagagtcattctacgtctcgtctgtttctcctcctaaacctcttcttcagcctcttctccagcccacaatgacacctgatgttgcagttcaatcgcttactccggccgcagttgaagcggcgtatagcctcatccagccttacgtgcaccggacgccactgctgacatgcaaaacactcgacacaatcgcctcaacaccgcaatcccccgaagccttggtcggaacgccatttgaaggccaaactcccgctcacccacaaattcgattctttttcaagtgcgagaaccttcagcgaattggtgccttcaaagcacgtggtgcattccacgcattgctgcgactattggaggagcgcggggaggaagtcaaacggcgcggggtggttacacatagctctggtattttccgatcttctaccacacaaatcagaattatacatgctgaatcttctgtctttcagggaaccatgcacaagccctcgcccttgctgcctcgactctgggtattcccgcctatattgtgatgccccgcatcagcacgccatcgaagattgcgggtacgcagtcccacggcgcggaggtaatcttcagcggctcgacaagtgtagaacgggaagctgtggtgggagagatacaggcgaagacaaacgccattcttgtgccaccgtacgatgacttcaatgtcatttgtgggcagggtacaacggctttggagctggaggcacagcatgccgaacaagctgggtcccgacccctagatgccgttatcactcctattggtggaggtggactcaactccggcgtggcgacgtggttctcgaataagaagacacgcgtgttcggcgcagagcccagctttgaaggcgcagatgattgtcggcgcggactgcaggttggactgcgtgtggaagccgttcgcaccctcactatcgcagatgggctgcgcactccagtgggattactcaattgggaggtcatctctaatccgaagaaggtggaaggggtgttcgctgtcactgaagagcagatcaagtcggccatgcggttggttatagagcgcatgaagcttgttgttgagccgagtgcagtggttggattggccgtgtgtctgtttgatgagaacttcaggcgacgagtcgagcaagagggtggaaaggagggatgggatattggcattgtattcagcggcggcaacacaaccgtcgaggcaattgccaagctgtttacatgaatctacgaaatttgagcctacgaaattgaatataaagcattggcagagatgaatatacaccgtgaatagaaccgttcaatcaatgatgaggatcagtcatctcaaccccagagtcacgaatgtaaaatgaaaagctcccaccattgttcgcctctattgcttccacgatgcgacgaggccattcattgtgtccccacgtattaacccatgccgatatcttcccttgctgaaccacgctctgccgtgaaggggcgtctttcacggctgcatgagcggccatgtcgggtggaaatggacgaacagaagaccggtggacaatcagacgcagtgttgcaaaagtgccccagggtgcagggagagcaggtctcagcggcggagtacgagcctggggctggtcgtagtaaccagcgccagaagctcgaccccctgataccgttgtagtatacacaactgcacactgaaactgactctgcaaacccttcagctcgctcaccagctcggtatagaggtcagacaaatagaaacttttcttttgctcgcgctcggcgtcaatctctgcctgaggacgcccgatttcttctgtccgagcgacctcgtcacgcagccggtcttgtttgatgaaggcggtggcactgtcgatggcgatcatttgcaagggacgtgatgcggaacgatgtcgtgagagatcgaaaaggtacgattctagcgtgcggattgtcgccaaaagagcagatgaagattgcgggcgaaatacatggacatgctgcagtgaagaaacgagcaatgattcaagatgatgatctggcattcctcctgattgagccccgagacctgactcagatgttccacgctgcttcagtacgatatctcgagccacagtccttagtctttcggcatcgaatcggtggtcggtatctataaacaccacggctgcctctttgccactgactgagatgtctccatatcttcgtggtaagatagcgagagccgtgagatagtacaatagctgcgacttccccgaagccgacaggctgcttgaaatctccaagacaggaacctgttgtttcttgctaccggttgggtcagagggcaacacattggcaagtggctcaatgtcttgcgcgccgtgtatttcatccggcctagaaccctgaccagccgggcattcactgtgcagcagcatttcctcatcttcaagaatctgctgttctataggctcacttgaaggttgaagctgtccatcgttcatagcacctgacataggaagtgctttcggcgcaaagacttcaagcaaagtgtccagaatgggcacgcccaatgaatgcgggtcatggcttgagtgactaggaaacacacgggccaatacagagagtatctagaactagtcaactcaatgcattcaacgaaataggcaagctgcaatacctcgtccaatccctcttcatgtacatcggctagcgatctctccccgagattggctgccatgggtaagcactggactgcgtcatggatcttgcatcacttgatcttgaccaaggcgtttaaagcgcagtgaatagatgcgaccacagtagtagaagtgtagaagtgaagtgtacaacatacgagtggtgatgcgtgcggaatcgaatagcgcggctgacggagcttcggaacttcccaacttccaaacttttcccttgacaacaccaaacctccataatctcactctagttggattatctcatattcataatcgcaaatcacaatggctcctctcgtccccgtattctccgccgaatccctccccgatcatgtcaataccgttcgccgcaacttcatagacaaacgccgcaaaggcgaaccagtcaacctcaaggagtgtccattacttgaaatgacacaattctcttgcaatccaccacaaaatggagtccccgaaccgggggttgtggtgtgtgagcctgtggtgcgattgttccgacggtgagtcttaagctccgcgttcaagtcaaatggcaagctgatcttgtagctgtgctggtgggttaatggttgaaacaacatcatgggagccaattaggattgcagaggaagcaaagcaagcagcaagtacaaaacaatgagacggactactttgcattacgaatgcgcattgggcggagttggctatatgggattacgactatttgcaagtttcaagaataaaagttgcattcgaataatgcttgtgactgccatggggtatctcctcaggtcatgctcctgaataaaacacaagcgccagcccataatcgggggagaaaagaaaagaaaagaacgccggtaagccttatgcctttgtaatttacaggtcaatcatgagatccgctggctcgacacttgctagaggctttggagtcttatcctctcttcgccgtgcattcgagctcgtctggcgccagagatctcgctcacagttgacaatggggcccagctccgagatgttgagtcggggcttggtgtcggcattcgccgggtgtcccgagtcaatatccatagctgagttggtgattgtgctgtgggagtccttgctgtgctttttggatagtcccttgattgtcttttcgaacatgctttccatgctgtccattctccgaccccagagtttcttatcgcggccagtcgaacccgtctggttgtcgcggaatgccgcgcccgctaatttgcgcaaagcttcctcgccatgccgtccatcctctgcagcgcgttccctaattttgcgcgggtcgttgtctcgtccgatgaaaactgcggtggcagagtaggtgtgtttgctagggaagctcgggaagtgtttggggatatagggacgacttgcgcggtcgtcttcactgcttagagacgtgaggaatgggagagatttggatatttcattctctggtgggggagatggtagtaatgtcggcttgggttggtcaaagggcgttttgagatgagggagaagatcatcgggattgaggcggagacgcttcagagcgtggtcgaaatcgtgcggaattggttgaatacgtcgcgcagatagcatggactgacggatgaatgtagagagtcggagcatatctggagatttcaggcgcaaaccgtcaattcaagctccaaaatgaatacgataccaggtcacgtacactcttcagtagcactgcagagacttgacagcgcagctggatcggctaactcaaaccccgaatccttcaaagtctggccgactgcccgattcattaattggtccagttgggtgtcatcttgcacgactggctcggacatggacgggagaatcacgggctcttgtaaacgatggtggtgatggtaatgacgctttatccgcttcgcatggttctgatcgaatgatgaagcaggtcgtttggtatgggcgcccgatgtcgccatggcgattgtgttggtctaattcaagaagtggtcgtccagactaggcaatgttatcgagttgggtcacggtcacgtgctaaggcggtaagtagatcgatgtcatagaccttcgggggaggaggaagcaatgtgaatgaatggcttagtttgggcttgagtagataaattgcttgggtaggacattcattatatgacggcaaataattcgaccaacaaggcttcgttcgtcctacatatcctccatctcgaaggcttcctcgtggtcttgcttttggtattgacataggtagtgctaaatggcaaaaagctattccattgatgcaagtgattcattatatataaatctacaagaaaatagatctttgatcgttatttcgcagccgcggaatggtaagggagtagtgaacatgccataaattgtagttggctctcatagttagaccgaccaatccggcggctcgcttagtccgctccgaagcttcaacttcacttcacaaatcagccttcttccctacccccctctcctctccccaccaacgtccgaggcaggatttaagctgtccacaacccatattgcttttgctcaagcatcgattgacgcaacttattcgtcgcaatgcccgccgccattccccccattaccggcgtacgtgccccttccgttgaaggccgggttaacccgctcgggttaccaggtcaattgaggtgttcggaatgatttactgacattctatgcctctcacagatgctccgccgtggtcttgtccttgacctgagcaccgctttcggtaagtcgtgattccggatcgagtggcatgattcaagccgacaagttgaacctcgcgatctcgcgggagcaaccacatgaaatacaaacaccatgaagacggctgggatgagatcaacaagtgaaatagttgctgactagggttatctcatccactaggcttcggtactaccttcggctacctctggtggtacggtaagtagatttatccccggctgcgccaccacgcgatcgataattcgaaatctgacatgtgtttgtcctacaggataccacctcccccgcgtgcgtgagcgtgatacctactacgctcgcctcgagattgagcgtgctgcccagcggggttaaatcgatcaaccctgatcacctctcgatcgtctccctcccgcccgttcggcgccagttcttttctttgtcaaagcgttatctagaaatcgcccagtggtgggggcatatgcctccacgtcaccatcgggtctggttggatcgacgggtgtgtacgagtgggtggttagatttgagattgattgtacatatacgcctgtggacaaccgaccgttttgatttttggacttgactcttgaaatagattaccgattggccatggccatcgcagaccattctacgtagtagcgcccgaacgcacagagcgatatacttgacccctacgcctgaccaaccaaaatgagcgaattggatctattgtgttcaaacgctaattacgccggatatatgtacgtggaaacaccagcgcacccttcgcgggattgccgaaccatgtctccgccatgtgtaaagccataaccatcatcccgtatctggtcatccccgtggggtatgggcgagtgtctcgtatggaaccgatggaaaaacggcaagtatgaagccctaacaggcgttcaccgtagcactcggtcaaatgatatgcctcggacggtcccgccggccatggaggtgcgcacgtttttcttgaagttctcacgagtggcgcgaagatcttccgcggcgtccttattgagagggtcggatgcgtttggctcaaggaaaaggaactgcagtagaatacgggttagctcaagtaacgaccggttaaaaggaagacatcaacggacctgcatgcccacaatgacagcattcaaattcaacacgggcttccagtcctctcgtagaatatttaagcagacgttgccctccaaatcgatattggggtggtagatcttctgcgtgcatttgaccttgggggggtcatgggggaagttctgattcacggcaaagctaaagttgaagacgccacccttatacatgccctcgtccggttcgatagtcaaggtgaagttaaggatgtcgtcagggttcgggaaagacattttcatcgtactgccgagggtgagttcttgaaggtctaaagaaaaacaagaggttagagatatataacaataagccattaatcaagcagcgagagtaataatgtccgctgcgggagagtcactcacctcgttgcacgcgtaattgcgccgcggtgaccttcttcttcttcttgcctccagcaccctcggcattttcagcctcctgctgcttttgcttctgtacagacggttaggaatagtttgattttatagaagcgccaaataaagccctaccatcgaccagattttcaacattttggttgggagtgaccaccccacctggtggaacggacgggtttccgggagagcgaagtagaaagtttatggcgagataaccactctggggatgtcagagagtaaaggagagacagaagccagatgcagagctataaaaagcgagatcaacgggtgacaacggtgacaatgatgagagtaaaggatagccttgtgcttgcggggtctcagatcagcaatcgtcctttatcgcctctccgccttccattgacatattcgacctcgggaactccgtactatacacagtctatgggatatatatctctactaagtattgaaatctcgaggagaaaaaaattaattgaatatgaagtacataatcatagcgctccgaatgcgatcccggtgcatggctgatccgacaaaaaaagatcacagtaaccgtcaaggtaaaaccgcgcgaatacatactggctggcattgcaaaatgaaaagagaacagaattgggcatctttaggtagaatacagatcacggtatgggaaagaaaaaggagaacgaacaggaaatatgggtcaggggggtcatgaaaaaggggcattttttgctcgctggaattcaactaccggcgtgcaaagcagcatttgataccagtgcgacccaggaaccaacagcatccaatgaagcggaacaatgccacaatggcgttggaccacaagagggcctggaagaaacgggctgtacgggcggtggcggtattctatgatcatattagctggtggtctaataacaaggttaagagaaagggcgaaaactcactgtgaagccgaacttgtcgacggcctcgctggtgatgcagacggccatgagtgcattactgaagatccaaaaggtgacaagtcgggtacggaaactcttgtaggagtcctcgagggtcttttcgtcgttttccacgggggcaacgaatggggtgagcgcacgcttcacagttgcctcgaactgactgtcgatatccgcttggggcttgtcaatttcttctattaccgcttccttgctgccttcgtcctttgtggtcgtggctgacggcaatgcatcggccttgtcggaacccttcgtaccccaggagacatcgtgccaattgctgaaggcatagacgttcaagatgttgatataggacgactggacaaccatataggcagggaaggaggtgaacatgtgccatgggtcagcgtacatgaaggaggcaacgaagtaaagaccgaatgtggcagccaaggcaatgataatgataccagcacccgtcgaaccgaagaaagagtcaaggaaggcttttacgcctttgtcggtaacaaagtccatgggcgcgccgccggtgaacgcacgaacgaccaggtagatcgaatcgaccacaatgtagacctgaatgagaccgaagaccacgaatgaagcgaggtaggagaacttggaacccttgggtctgttaccgagcgcgagaatgaactgcagcaataggaaagcgaggtatccgtacttgacaatggtgttgataatgggcgtggccgtcttgccgaaggggaaagcggtttgtccgttgctggcgctgggagtaccgacaaggtcaatgatgacagtggtggtcagccagtatgatgccagggagaaccaggtgaggatagtgttgaagatgttatacaacatctgaatgtggaggaagaacatgcgcacgatgttgtgaccactcttgtacatacgtccaaagtgcatcagcgagtaaataccggctgcaaaagaaccgttgagccaacggcgacgctgggagatgaactcggcagcaccttcgggcacatcagtttcacccttagaggctttgacgtaggacaagtgccacttagagcctgctttggcgaccaactcgaaacagagaattcgatcctcggccaagaacatgttcttcttgaaaatgttcataccctcaatacccttctttccgagctgcttagacagcgtgtgatcaccatggaaatattgttcgagagggcgacccatgattgcacggaatcgataggccgagaatgcaccgggcaagacactaacgtaaccaaacgaactctccagaggcttatccaagatgttactgatcttgtactcgaagttctgagcagccacgagagggttgatcaagtttttccatcccttacccagcatagcgtgaatttcaccacaagcgccgccgagatccttgtcgttatagaatgcttcccagaggtacaacaacgacttagggccaggcttcgtaccggcatccagaaggatacagatctcggggttcagaatgcggccgaaggcgttaaagagccaacgatgcgaattgatcttcttgctgttcttttgtttcaaacagaacatcatttgcactggtgggagtgtgctgggcccatcgtccgtaggccgaatgagctgctgacttggcgtgaccgaaagctgagtcgtatattcaaactggatattctgttagcgctatttcatttggagccatattccgtccacttacaatatgcgccaaagtctccttgccgtcaacgtcgcgcttcatgacaccatcctggtagataccgacagtcgcaagaacgtcaagagtatccttgtcgcaagggtcaataccatcaaagaccagcgccacaacaatcttctgccacgcgggtccacccttgttccagaactcggatttcttcaggttgacaatgtcgcgaatgttctgcatcacaccgtgcaaggtacgggccgttagattcttatcctcgttgtagtaggtaatcgcgatgagcagctccgtatgacggttgtacatcgcggggcgcagattgtaaccattgtggagagtgaattcgttaggatcacaagtggctgcggtgtctatgaagtgaaggctcattagtctttttctcttagagccatatgttcggtccacacgtacatcgcatgtgggtaaactcctcgcttccaccttccacgtcgttgcggtatttggcttggatggcattctggatggcactgggcacggggtagtcgacactcaggacggaaccctgcactagcttgaccttcctggtagcatatctgcgcaagccaccgccagcaccaccaccgacaccaccgcccccaggggcctgtcgctggcgccaagcctctgtggatgaggtttcgctgcgggcgtagggcgatgcaactcggccggggaccccaaaggctgccgcggtggtctcatcctggccggagtagacgttgccagtattatatgggtcgtggtacgaaggggcggtgtccgctgcgtaggtctccgtcaagctgtaccccgaagctgggcgctggggagaaacgccgcgcgagtgggggtcatcaaagggcgtcgcgaatggaccctgctgttgggacaataatccgcgggctgcatcctcatcctcgcgatactaaagaaaaaaaaaacaccgaggtcagctctagcaactagttcaccgcctctccacacacatacctgcgaagatggcacatcctgcagatgaacaccgtcatcgtagcccggggagtgcgagccagagccgtggtaggccatggtgtcgcaaaggttgaaaaatcagaaagggatgtgtttcaaagctgacaggagaggggtatctgttcaagcagggcgcatttatgaacaattatcgaagcaacggggctaggggaagggagaaagtgaaatctgtttttcccgagaatcttggaatattgcaaatgttttgaatcaagggtcaaagaaaagaaaggaagagaagggggggaaagggtaaaaaaaaagggagacagtcagactagaagggtcaaaaatagaccgtctctaaccccgtcctggtttagtttcccctttattttgggggtttttttcatttgactagtttattggaattatttgtatctttaaatatgtacggagtatttatttttgactattctatactagccatggatatccttgacttagtcgtaaatcgcatacatactccatgtccatccctggagaacaatagcccgatggccccccgaggccctatggaggaccctcactggttaggaggcgaaagctgagatgctcggaattctgacatttactctagtctccttttcgttctgattcgtggccttctattgattctatgatgctttgggtagggagcagccttggaactacatacatactccagatcttttatacgtggtactgagtggactagaacacccgaacctaataaacttgctccactggtgaaacacttggtgaatagacctctcatataagagttcagtttggttcacctaggtagatatagagaattcattccacattcttgagagaacaacaataccattagaaaaggcttgacacctagggcggtatgcccgactccactataggtgtttgaatgccagcacataaatgtgttcaaagccctcggctacagcgtcccgttttaattcctcaattgcaggctgagcttattctgtaattctttgtgtatggttattctatcattctaccaagtactctagcatgaagtatactctgaggtcacctgactctggtaattttagacctcactgtggaccctaagcatttagcgtatgtatattttgctgtgccaagtcgattagcctattatattccaaggctaacattaaccttgggctgagttgtgctgatgttcagcctcgtagtcagttcattccatatgcggtggctatgtcactgcgccccgaggtatacgatgattaccatgggttgaaaatttcgaatcttaatttcccttaatgtccctgatttcccttttttccccgtttccccaattccccaattcgccaagataataagatttcagtgaccccattcgtctggtccacggaaggcagttagagattaattgccgctaacccgattggggaaatacaccagaaacagcacccggacaacaagataagcagacaaaccaaacaaacacgccaaacaaaccacaaacaaaccaaatcagacaaacagccaacgaaaaactctatttctcgcaatcttggaaaatcgatgatccgagagtccagacccgcggaccacttgcaggcacagtaagatgcccacttatgttcctcgcatccatgtaaggtgaacatgggatgaaacaatctgatagcatatttaatattaaaggctgtagcatctcagatttcacttcatttttccctgcatgttttcgccttatatcctctctacaccagacctaggtactactataaaatatacaccacaacccgttgtgtacctgactaccccgtatattacccgtggaacctcacgggcccgtgaccaaggcccccccaattatccccccgtctctcttttgacttgtcatactctctatctccctctctctctctcatttattcatctattctccccacactgatcttgcgatcgggtgtggtttgtgagtcgattttctctgatacgcgcgtcgggccaacgtcaacaaatcaagcccccctatcccgaccgtctttgacatatacaatccctgtcaagtgtctggaccattccgaggaccatgaccatcacttaaatcgcatctcgaccttgatttcacacacgacactcgtttcctgccacgcctcacggctcggctttgatgatctactgtttacgctcacgacttgacgccgattgagcaccttacactccttttttcttattttatcttgcacattctttgccgttgaccggctttatcgatatctttctctgttttttatctcgatcttcctcgcctaccatgtctttcgaacccatggattccgccttcttccccgcccgctccgtcttcaagcgctgcaagcagtgtgaaaccacatcccccgcctgtcccgcatgtcccgatggatcaatatgtaccatgaccgccccgagctgtgatgcatgcgccaccactaagtgcgtttcaacgggcgccgcgccctcgaactccgggggcaccgacactggcgctattgctggtggtgttgtcggaggcgtggctgccatcgccatcgttgtattcttgatatggtggttcatcatccgaaagaagcgcctggagcgccaggaggcggagaagaacggttcattcgcagcagctcgcagtgaacgccggtccatcgcctctacagtcctaacccgtgcctccaatgtaatccaaatcgcttacattcctggtgtcaccaaccgctctccaccgcagaccccatccacccttatgcctcctattccaccgcttcctggtgcgacacccgatcaacacttcttcatgccgggtgacctgcgtgactcgtcatggacgaccactaccggccaccagagcatctcccccactttgcgcagcagtgtggccaccaccatctaccgcaacgatgccattgtcagtgccgttcctgcgcagcagatacagcggactcgggcagccgtcgtgagtatccacaacggaggacctgggtcggcgaatgcccctggagacgactcgcccgttactgtcacgattacccctgcagacgcacccgctgtcccagccattaccccggcgcaactcgctcgggcggaggctgtcaagggcaacagttcatgtattgctcgcagtgtaaccgccaagccagtgatggtgcgtggcccttcggtgaagaacaagcaagccaacaacgcgcccgctgccaaccgagtcgaagagctgtccgggaacagtaaaagcaatgacaccagcccgacagtatcaaccacaaacagcaaccagtccagtccgttctcatcggtcgaagatgaagctgccgattcttcgattcgcgacgcacgtcgcgcttccggcttgagtgacggacgtaactcccctcggacgccacccgcacgggtagaaagtccattctcggatgccaatgaggtgaaatgagctggtctgggaccaactgggcgcaacggtttttctattttgtgatttcccactatgctttctctgtatgtatggagcctaccatggctttttgtaccttttagatatgtccttccttcgggtgccttgtacagcgagtgttggcacactgagatgggattgtcgattgaatctttactctcattcattttcattttggagtatcataccttcacattcgtactgccatgagaatccgtgttacactgtcctataggcttctttcggactaaactatctctatcgcgaattttccaaaaaccgaagcagataaaatgtttaaagtaatcgcagaataaaaatgagacccttcccacttcacttctaaagtcactcttgactactagctcgcagacggacttgtgctgtctttacatggagatagtatcaccatgcttctgatttatatacttaagactagccgaattcacttaactacatatttttcgtcatacttttcgttttgttttgttttcgttttctcgaaccttgttatatatttcccagctcgaacaacaccaaacacacaagacctatacacctaaccgcccctctagcccgccccaagatcccaaagcctcttaaactcgctatctcgcttcacaagagcgggaggacaatcccattctaggagccgaccaccccccataacagcaacacgatcaaagtcgacgacggcaccaaggcgatgcgcaacagcaataacgcgcatcatatcccggatgagccgctcggaccgctcatcgacgttgctgctcgcttcgtcgattaggacgatccgtttgccggccagcatagcccgggcgatgcacaggagctggcgccggccctgcgagagccggtcggcgtctagcgggctgtctagaccgcccagccgatctacgacatcgtccctcttgagctggtgcagcactgtttacccatagtaagaggttagtgccgtgtttttttgtgtcacattggggcttgggggcgctgttaaaactcacatcagcagaaagcgacaaagggcacaagtgtggatgcaaaatacccagaaaagacgcacatcaggatgaccgacatgatgatgagggcgaagggcagctcggtgtcgacagccgacatgtcctggctgaagcgattcgtggtgacttcgacgtcggtacgcgagaagaaggccactggggtattcatgacggaatggagaagccgggcgtggagaacctcggagctcgaagccaccatgacgaccaggaagagatatgcagcccctgtgatgcccaagacggcaagaccagtgagctttgcgaggagaccgaggcagtagtcattggtggcttggccggatccttctgtagtgtctgtccagaagctgagtacgagtgccgtcatccgataacttcccgtgtacagaatggtgaggacagcgagcagtatggtgtgccatacagggacggagccaaagtaatacgcatatgtggcaaactcgccgaggactcgtccgggcgattcagagtcgtcgctgtcctgttcagcatcttgttcatatcggccccgaggaacagtctcgtggcgatgctgcaccgatgcgtcagctgcgtcctgcgtgtcaatcgcgccgttctgctcgactgccagcccatgcggataatctgtatcggatcgaagttgggcgaatgacccctgatgcacgatatggccgctcacatccagagcgacgataagatctgcataggcgagtctatggatggcgttcgtgacacagaccatagttatgctcatctcttggaagagacccgtctcggcaaaaagattctgtaagacgtgctcctcggtcgccgcatcctgccctgcaaagacatcttccaacaagacagtcttcttcgtggattagacggctcgggccaaggcgagccgctgcttttggccgccgctcaacgaagaccccgcgctgcctgcccttgtcgcatcttcgtcgggaagctcgttgatatcctactctagcccgcacgcgtagacaactttgtcgtaccattccgcgtcgtagctggcactgcctaggatattatggcgtatcgtcaggttctggattcagggctcctgaccaacaaacgcgatattgccgggatcggcatggatggaacccgcttggagcgggacttctcctagaatggctcgcatgagagtgctcttgcctgagccgacaggtccaacgacgaaggtgaatctgcggattccaacagtgatgtcgttgaggatgtccggctttccgggaacccagccaaaattggctcctgatatcgctacaagcgtgtctcctttctcatcggcttagcttggatgatgatcccgctcgcccaagggcaggaacaagagcagaaatccatcgacgaaggcgagcacggcggcggacgtccgcaaccgagagaaaggccacttctctgcattcagagcccagtacaccaagactgcaagttatagagccgtgtagacgccgatcaacccctgcagttactgaactagtcagtagttgttttttcttgggccagagaaaaactagggcggaggttatcacgtgccacttccacgattggccggtggcttttggcgaccttgcgaggctgtctcgcgagccagaagagactctgtagggacacaaccagaaatagagccgaggggacgatgcagagaatggcgtcctcgaaggctggcataaagtcgaaagcgcctgtgctagcaacgacggcaaaccgagcttcgggcgacatttctaacctctcacctagctatcctttgaagccttatcaaaatactggaaggctttcattggagaagttggttatattgggctggttgcgcgatatgaaggaatctggtgcaatattacgtttcatggcgtactggcggttggagactgccataggaagggaatcggtcaaatacgtagatttaccattaacgtttgttcgaaacctgcttattggtcaggtaaaatgatacaaggtcaatgaaatgatgatcagatcatagaattgaatcttgtcttctcgttctgttgtgcccctttgtatacatcagtaccccgcttccaggtcccaacgacttccagacctatatcgtaggcggatcaaggaacagtactccgatccatagttttacactgttcctctttgacaacgacgaataatattatgaaagaagagatccataacacaactactccgtattcgaagtggcacccactaatcgggaaggtgggtactataagggccgggccgtgttctggaacaaccacgatgttgtacatactcgaatctatcattttattaaattctcattaaatacgatgcttgaagtagaggcaaataagctcctagcattggagaagatagagagagtaagccatctttgctcaaactaggaaatagggccttggctgagagtgacaagggcatatcgacaagacctgattttgaccgtcacacctataagatgtacattcttttaacactatttgacatgtttcttacgcatatatacaagcttctgcacgccttccggttgcttggttgaatgattaatatagattacataaaactaactagagtggtgattggcccataccgctaaaatatattccccgaagtacataaaccaaactgcgttcaaatccgagtccgatcctaatagaatctataacagcccgacagctcccttattatatgaatattccactcatccctgagacttttcttgcgtcttttctgacgaattatgaggtacgtcggggttctcatccaatcgttcggtaacaagctccttcagagaatgttttggagaagtactggggaacatgtcagatatatagcatgagtggaattgtctattgcctcactcacgatgtaaatgaattctcgtagtctgcccggatttgcctatctgactcttccttgtccacgatcttttgaaggtcttcagggagaggctccgaaatcgactctctgtcttcttcgcgttcaggcataatgttctaggatttagatactataaccgtggatgtggataagtctagaatcattccaggtaggaatgcggataatataggctactttgtatagatcggtggtaccgcggtagacatggagggcgcccctcacattattgacgtcacgcgagacaatccggttatctcctgaacttcgggcgacctgagccgtccgatcgtagaaggttcacgggatggtgagtcattattgcttcattatgatgtaatgcgccgaaatggcctgaggtatggatatctcggaaatatgtcggccaaaacccccctcatatcttccctcgccatcccctccatcgcggtttctcaatccttgccaatcttttctagcacagttgtacggtggccgaagtcatcttttgactaaagaaatgtccgagaaagaacaaaaagacggttcggcggctctcgggctgcagaggacagagactaaggagtccctggaggatttgggaatatcagacaagtctccaccattggacgtcaactatccagaagttggtcgtgcagagaaccctgaattccccgaggagtacaccatcgagacgaaaactggcctcgtccctgaatcagcactgaagcaggtacgctctgaggcgagccagcacaaggcctcacggcaggactcgaaagagtcaggaaagcgttaatgaccttctcctctccgacaatgagaatcatcatgctgtctctttagctgcatcatttgtgattgtctacattgcatattccatgtccatcgccaccgacttcgactcgagggatcgagcttcatttgggaaaactacaacatctcgctcgaggtcaccacattcacctgctctatcatcgtctgtggattcgtcacgcctctgcttaggtctcctttgcccgacacaattgatcaagggcctgaatacattgtctcgctgagttggtgtttgcattcaacatctcatatactccgtcgccgaatattggcgggctccttgtctgcaggttcttgtgttgcgttccggttcaggcctatcactggccggtgattgaagagcccatcctgatacagctcctcattgtgattctgtcgtcggcccgattgtttgcggttgaatcaacattggctcgcgtcgtcttgaattgttcttttgcgttaatatagcgttttctcgttgaagctattcttattatacataaatctctaattttccactatataatgacatattactggtgtttaaaaaaaagtgatttaattctgccggacttaataattctatacttttgaatcctacttgatatacggagttgtcaaaaaattcctacactttgatcagataacaacgtgtatttgatcgcatacctattctttcaatcccttaatcatgattgatagagcagtcgttaaaatagttgtgaaagcagttgttgacgatgaagtagttgatgtgataaaagtgacttaattttgttagtggtttatatacaaattgtaggtatctaccgtcttgctagnnnnnnnnnnnnnnnnnnnnnnnnnnnnnnnnnnnnnnnnnnnnnnnnnnnnnnnnnnnnnnnnnnnnnnnnnnnnnnnnnnnnnnnnnnnnnnnnnnnnnnnnnnnnnnnnnnnnnnnnnnnnnnnnnnnnnnnnnnnnnnnnnnnnnagggggggggggggtcgaattagcaatgggagtccctgtcagtcacaaccccctattcttatacatacctcaatcgttctaatcaatatggcaggcagtcgaagataggtggacaattatacagtgggaaggcttcaaacccaagagataagggaattccaggatttgcataggtacgaatagcgtcacatctattgaagtagaaagggaaagaatcgtgagtcgctagaagaaagacagatcctcacgtctagctgtttgtaaacatggaggaaaatcaagggtatataaccagaatatctagtcaacaatgctcagcatccggtaattcaagccacactctcatccagccccattccacgtccgattttacgaatcaatgcccgcttgagaagagcttcacgtgcaagactccgtgtatgccgtgaccaggaatcgacaccaataacaccgcggaccagcgcagcctgcaacgcatagagcgcttgctgtataccttgctcctcggccactaaatcatatagctgtttccctaccacggtgggggcgactaggacgtcatcaattgggggctggccggccggagtgtctggagtagcggagcttgaagcagcgccagaagcggagacagagcgggcctgcgcgtctgcaatggtagcgtcggcgcgatggatagattgctgtaggacagcggtgttggattggagggtcgcatggagagtattgagcgccgagagttccccctgcagtgtggtcatagcgccatgcagggactgtgattgtgagacaagagactgcgctgccgtgtcggattgagcagcgttagcacggagggtttccgccagggtctgggacacgacatgaaggagtgcatctttctctgggtttggcgggatgggaggcgctggtcctgctggcgcgattgagggtagctcgacttcaaatggcgaggttagaaggtcgggtgtgtcggccttgatgggagctgctgggggtggacggggataattggatgggtatggagaatgctgaggatatgggggaccaagcggttgctggtgtggttgctgggggaattgcggctgcataggcaagtgagcccccgtaggttgagcttgaagagggagttggcttaaagacccagccgcatgatggagcggcgcaccactgtttctataatacggtgcttgaccctgcgccgactggggctgccccgctggctgatggattggtgggtgtgacaagggacgaggactgcttatcggccctccagtttgggccggtggcgcgtaattctggtatgagtggattcttgggctagccaattgtgcggacacatatggttgacgagagccttgctcttttggtggaggtagcggtggggaatattgatattgatcgaccgggtgccgttgttgttgctgctgcagatgttctccagccgcgcctggcttcggcggaggcgggggtggaatctggctctgacgctggccttggcttgtaggcggagacatagactgagcttgtcttgaagatccgacaccgggtggaaggggaggtaagggcgggggtgtttgcgcagcttccagctgaggatgtggcacttgttgtctgtatcggactggtggctccttggcaaatacatcctgaagaatagaaagaagatcggcaatgttggatctctgtgaataaaatagtcagcggtctgtaaacccatatcttgcgagcactaacctcccaggcttcagcccagtgtgctagatagtggtggtacacctgtccctccagcgtcacatgttgcccaactcggacagccatttcctgcgtcggcgtcacgtaggcaattggagggtcgcgtgggtatgtatttggaatccaaagcgcaatgggaaatcgatatgtcgttcctcggaaggtgacaggcaacgtgcccacaagatgaaggaggagggccgagaaccctgtctcgtaggctgctgggcattagaaaatatgaatcgcataagaaacatatggacactcactgtagacatctgttcgaggggagagcgaggggtactgggagagcgcattggcgacatcgtggtaggtccggtttgggtcgcggtaggtctgttgtggatcatagtgatcctggaggggtttagtaggtcggataacatgaagttttcggagagaccaactttggacaggacactatacagccaattcagtgtcctctgagggaccgccatagcgagaggaatgatggaaaagggttggaggcgcgacagtttcctcttccccgcagagtttcttggcgaagtatggaccttgtggtcttttcaaaatgttgtattagaagatatattttgataggagatactatttcttagtagtcttagtctctatgatctaggtataggtgacaaggtagttccagtgtacggagcataactactaagcaacttggtgacacctccactgcgccttaactacatctccgtacaccttacacctcacctcaccatttcatcattgaaataatcttgtcttgcttttgtcccttcgtaacacgagaagatacaggttcgagtctgaataaataatagcactccttttgctgctgaagtctcgaggagcgagacagattcgctaaatgataggctaatggtctgaatcagagacctctgtcttatatgacacgtccaggcctctccagaactctatcgacaaggcacatccttgagatcctcgaatccctggaactcattgacatcgttaaaatcctcgaaatccttgagtcggggtttgtatccctggaaacccggaacaaagaaaaccaagcttgagcttcgcaagccagtgatattcacaagaaagcctgagtattctgaagatctcatgcagccattatcacccggtacctagaaattgatgggctcctttgtttcatttaatattgttcttcccattcccttagtattgttcttttactcacattgaagggcataatgatctggacctggactgattattatacattgccttcgccattgtctgtctcggtctctatgacgctggccattcaccctgattctcttgatgatattgctgatttatatttacaagtcctacaagggcttttaaaacagacctcatcttctaacatgcatacttcgacctaacttcagaattatctatgtgaccactcctttaattctttcaactgaacttcaattaccaaagtcatggcggcgacaccatctccaagtcccggattcgatccatccacccagaccgtcatcttccacctacgagatggcactgagttacccgtctcagtacaagcactggacatcttcgtcatgtacaatgtccgggtatgcatcaactacggttgccagtttggggcatcgctcacgttgctggttattcttctgcttttgacccattccgacaagcgccgttcggcggtttttatcctgaacgccctggcgttgttcctcaacagcgggcgtctgcttttccaagtcatccacttctctactggattcgaaacggtatatccattcgtctccggcgactattcatccgtgccgtggagcgcatacgccatttccatcgtggctgtcgttctcaccaccctagtcgtcgtctgcatcgaagcatcacttgtgattcaagtgcacgttgtttgctctacactatgtcgtcgataccgacatcctctcctagtgttatctgttctggtcgccctggtgccgattggattccgctgtgcatggatggttgtgaactgcaaggccatcatcacactcaactacatgtctgatatatggtggatagaaagcgcaaccaacatctgcgtcaccatcagcatctgcttcttctgcgtcatcttcgtcaccaagctcggattcgccatcaaacagcgccgccgactcggcgtgcgcgaattcggcccgatgaaagtcatcttcgtcatgggctgccagaccatggttgtccccgccatcttctccatcgtccagtactacatcactgtgccagaactggcctccaatgtggtgacattggtcgtcatctcactcccactctcgtcaatctgggcgggtgccgccctcgagcactcccgacgtaccggaagccaagatcctcaacgccgacgcaacttatggcgggtccttgctggtggtgcagaaagcttactgtctcccacaaaggacagtccaacgagcctgactgctatgactgctgcgcagactctgtgctactcggaccataccatgagcaagagctcatacaactcgcgcgacaacgatgctttctatggaatatcggttgaacacgatattacgatcaatcgagttcaaagaaacaatgagatcgtgtgatgagcacagcgctccgcaattcagagataccctcctttcatttcgatgtacaggatcttggccagacatcgactttacgcgtaaattgtttttttttttttctttttttcttcaattgggttctatactggctcaccattccgtttggctcaatctgcaaagtgtaaatgcattcttaataccaagtcatattcattatttttcactccttgctttcgagagccatagttgcattacatgacgtttgactgcattgtagatctacgagtgggtgaacttgagggtttcccatgttctttctcactaatagtaagtgtctatattgaggacaggttctgctctgaagttcaaatggagtctcaacagtaagaaagaagttgagtataccatcgaggatgggattagaatacatatatgtatgaagcttgtgcaataaatacagccagtctactgaatgcaacaaattgcgatgagcagagtcaagtgaattaacaatacataaaaaaaagccacaaatatttacaggtgaaacgctctatgttcagaaccacatgtgcgccagagccaaaggacaaaaaggagctagaaaattaatagtatccggtgctaattcagttccacatagttggctaggaatgttagaaaacgtaataaattgaacaagaaagacttgaaacacttacccggaaactggccctcccgacctccaattcgcccagaccaccattcattggtattttcagagcgctgggtaatctcaataacatcaccagctgagaatcccagatcaccgtgtgcctgagcctcgtagtcataaagagcggtgacagtctcaaccggcttactgagatgggacggcttcgcctttggaggaggcggggcggccttgctcttggcggcggaagagaagctgcctgtcgggctagcgccggcagacgaataaggtggtggagggttgtcatcggtggcggtggaggcggaacggcctcggccgatggagcctttggtatcggatctcttgctatcggatctcttgatatcgcctgccttgcccggagggcctagtttggatccagagcggcggacgccttgggttttaaagtgcacgatggtaagggcttcagcttgttcctggatattgccgcgcttctgctcaaaggcctcttccacgtcgagttcaagattgaaataggcgatgttcataccctgcattcgttcgtggagggtgtagaagacgttgagttgcatatagtagaaagactggaagagcgggcggatgaactcggcttcgagggcgaacagcttgggcagttcgtcctttagtaaatcgttgtaatagttaaactcctgggttgccacctcaacatcgttctcggctttgtatagtgctttctcgtctttgagcgatttgtcctttttctcttcgagctttttcagtgtcgcgttgcggcgatcaaagtccagcttcttgtgatcacgcttaaccgcgaccttccggatcaccttgatcacctcgagcagctggtcggccgggctgataatgcggctgttgatcatctccagctcgggggctagggcctcttggagttcctggacaatgacttcatattcctcacaggcctggatgccctcggcatttccttcgaattggtaggaggtgggatcggaggcgcgaccggagatgggtttgtagatttcggcgactgctttggagaattcaatttggtggctcaacatgcctgcgcacgcgatcagtagggagaggtatagagtggagagatcaaagagttaccattaatggcagaaaagtatttcttggactcatcgtggagcttcttggtctctcgctcgagctcatcaaagcggcgttcggcatcggtatagacagcatccttggaatgctcaccgatgttgaacttgaccttgaactgctgtggcgcacgcgcaatactcttctggaagcctttaaaactcatgatgtggagtatattaaggagagaagtgaagaagagaaagtgccaaggtggggggaaagaagaagaaggaacccaaaccttttcaatgacataagacttggccagcgttgtacggagctgatgtccagtgtggctgtacccatttccttttatactattccacgctattttgtactattctatacgctactgttctgccctatgatcatgtggcgcatatcttcttaggcacctggattacgacctacaacatacatactacatacggtagtacttcaactcctgtccatgttctatagtgtatagttacagagtactccgtacatattttagctctaaacacctcgaatggttacagtgcttacatctctactctcgacgacctcaagaactgtttctctttcctcggcagccttacccgagaatgtcctaagatcaaattaaggaccccagtccgttcgtcatcattgggccattcttccttgggacgtgcgggggggggtgacttggcaatgagatgaaatgggtgaatacaagaagtcggaagaaagagggctctaaaatgatcaaattagaatcctcaagactgttataaaacagagaaatgaagatctgatatagtcatggacgccctggatacttatacccgaaaggggaaagctcataactccgtcatgcctcaggcatcacggataaactcaattgggaaaaccccgagatctttagtcattgggaggagatgcaagtgataactaacaaaaagtcgtagcgtttccttttcatcccaccttcaaggatatcggcacaaatcatctccataatgacaagtgctgttcccactgcttggagacaggcctctgccttctccaggcgtctttcaacttatggttcccgagctcctcgagtcctcgccaccgggctgcgcggtgctcgttcttatgtatccgaaacaaaagttggccaagcccaggttaacatcgagactgccatcaaggaggaacaaaaggcattcatgaaccagtcccacatggcgccccagagcgtcaagctgcctggctcggcaacctccggtgacgccgcgttgagcccttcggccggcatcctgaagcaagccaccgttatggaccagggcacccggcccatctaccttgatatgcaggccactacacctctggaccctcgcgttctggatgctatgcttccttacctcaccggcatttacggtaacccgcactcgcgcacacacgcctacggttgggagtcggagaagggagttgaggaggctcgcgagcatatcgccaagctgattggggccgacccaaaggagattatctttacaagtggtgcgacggagagtaacaatatgagtttgaagggcgtggcacggttctttggtcgctcgggaaagaaaaatcatatcatcactacccagactgaacacaagtgtgtgctcgacagttgccgacacttgcaggatgaaggtttcgaggtgacttacctgccagtgcagagcaacggtttgatccgcatgtcggatcttgaagaggccatgcgtcccgagacttgcattgtcagtgtcatggctgttaacaatgagatcggtgtgatccagccgatggaggagattggccgtctctgtcggtccaagaaggtgttcttccacaccgacgctgcccaggctgttggaaagattccgttggatgtgaacaagctgaacatcgatctgatgtcgatttccagccacaagatctacggccctaagggtattggtgcttgcttcgtgcgtcgtcgcccgcgtgtccgtctcgatcctctcatcactggtggtggacaggaaagaggtctacgtagtggcaccttggctccttccctggtcgtgggctttggcgaggcatgccgaattgctgcccaagatatggaggtaagctctttcccattttctatttcccgtttccatcattgctgccattattacgcactgtgatagaccttttggagactaggtaatccgtgttcttggacatggtactcagttccaatgacgtcaggcgcgggcgtaatgctggcagacagatgaactctatctttcccgtcggaaaacagtatgctaactgactggttaatagtacgacactaaacacatcgatcgcctgtcgaagcgtctgagcgagggcctccttgcaatggaacacaccacgctaaacggtgaccccgagcaccactaccctggctgcgtgaacatctcattcgcctacgttgagggtgaatccctactgatggcgctgaacgacattgcgctgtcatcgggcagtgcctgtacctccgcctctctggaacccagctacgtgctgcgcgctttgggcagcagtgacgagagtgcgcacagcagtatccgtttcggtattggtcgattcacctcggacgaggagattgactacgttctcaaggctgtccaggctcgtgtatctttcttgcgcgaactgagcccgctttgggagttggttcaggagggagttgatttgaacacgatcgagtggagccagcattgatcatattaattttattttgagagcaaaagcccattagggacggcgttgaagtgtaacaacatcggatttgtacagactggaaataatcaccacgcaattaaatactctctatcttccctctaagccccgatgccttgtacgtcacctggattacctcaagggctccccggggtctaagatatcactcgagtaagacctatgtcttgtatgatcagtctgtaatatgaacagcatttaattaatttggaattttctctcggcccaaaacccaccgtagtctgaaggctgtctactctttggcaaagaagttaaatttatctaccgagagtcaattcgtaggttgcacttgatttccacgatgcatctattcctcatcctttgcacattcgggggtaatgcagccgctctccctggtcaccgatcaccggagcttcaagtggtaacctcttccggctctttgaatgggatatacaacgactcagcacacacagtacgggcatttcttgggactccatatcgccagagttccatatcttatacggaagaatgctccaaatagactcatcggagtacgtatgcacctgtggacagggattgccgaaggaggatgcatcgatggggctttggggtggtgattttgggcgtcgtggtgcccatcgcagttcttggactgggggctcggcatatgtctgaagactgtttgtatttgaatatctgggcaccttctgtcaagcatcgaggctttaggggacttcaaaaagctgcagtcatgattttcattcatggagggagctgtgacactggtgctagttcggttgcctactacgatggcacgaattcggtacggaatcacgacgatctgattgttgttacttttaagtaaggagatgctgggttttggctattagatttactaaactctggccagttatcggctcaatgtttcttggatttctgaatgccaggtatcgacccttccgagcagaatcttggactcctggaccaggtagatattgagaatctgtggttgagagagtacgaatgaactgaccatatttagcgattggcaatccagtggggtcatgaaaatatagccgaattcagtggtgatccagataggattcttctgtttggtcaatctgctggagctgcttcggttgatatccattcatatgcagtgagcacgtcgtttctatattggtgttttcatatatgaataacctctgatagtaccctgaaaatccgctcgctagtgcatttgctcttcattccggtaccgctccgttactggtttaaccattcgagtgaatcggcaggtgcccacttggaggtatctataccatggatattttaccaatctcagcccacctccatggcttggagcatatcacgggggtaagaagaaagcagctatttgcttgctggtttgattaagagcatgatgacagctgagatacctttggtttttggaactataacatgtctatgatccctttgtcagccaaggttagtgtcaggcattgcgtggattgacgaatttcttggggcttgggttgcatttgccaaggatcctcgtacgggactgagcaaatatgggtggccagcgttcagctttgatcgtagattgatgttctctcgtttgtgatttgaggctgatcatgggatggagccaaccttgatcaacctcgctctgaataacactgttcaggcagtatttactgggagttcctgggatctcttgtgaagtcactcggtctgagctgtaagtttggcggagttatattgtgctacgatgggagagctaggtatttccagactcgtttgaaatgtgttccatgatatttaccgagccttgcatggataggagtctaccccgtatacgtacgtaccttgaggcctatgatgtatacctcggacctcggccagacttattattaatcagtgatgccttatgcatcaggcatatattcttatttatgaatatggacctttattatgggtaggaaagaaaagaaaaaaaaagaaggatcaaatatgcccaaataccaaagtagcatgaggtccgatctaaatccccggctatgcatccttcagatcaaggttggcgatcctgagtgaagcgaattcgaagccaaaataagcgaaaagggcgagaataccgcaaatggccctgtcggccgtgtcttggccggtttaggccctttgcctggcactcagtttcgccttcgcttaatttgcactccacttgggtctcgcggatgcacccagtccctcttggcgtgctatcatttgattgtatagccatataaaatgtacctggtctctctccctgatcgaccggatcgccctgctcgactcctctaaaacttccccgaggtcctctaaaaagagtcactttccctcctatgtcggagcccttgcaactttattattctcgtcccctttatcctattgctcttagttaacgactaacggaatgattagaaatggtctgacggtcttacccatccagggatccccggtgaaattacgtgctgaactgccggcgaaaactctgactatttagcccagatcgtgccattttcttcatgcgacgttggtagaatccaaatattattctctttctcttccgtcatcatccgcagacatccaacctggggaagccaagtcatacatctggctccggattattcccggtctctctggtctgattttctggtataatcccatataatccttttgttccattttcaacttctcaatctctcaactctgattcttgcatttattatatttatatactttgaacccttgaatccttgaatatctgttatgttgtctccggtgccaaatcccgccgattatggaatcactgccgattatggtttcctttccgcagaacttcctttagaggtgctccccgatccttactacgccgaatgggagatgataattggcaatctccacccattgatattgagcaaacggctgcattcggtcgtggacactctgcctatactttcggccacgcacctgcagacggaggctgagtggcgtcgtgcatatgtcatactggcgttcattctgcacggctatgtctggggtggcgattcacccacagaggtaccggcccatcctattggttgaaaaagtagatgtactgattctttaaaagaggattccacctcaacttacagtacccttatttgaagtctgtgaacgactcgaattaccccccgttgcaacatatgctggagtctgcctttggaactacaagccgatcttctccgatgagccagccaccagcctggataacctagcatgtctacaaaccttcaccggatctctagatgagcaatggttctacctagtgtcagtcgccatagaagcacgtgggggcccttctattcccctgatgattcgggccatcacggcggcccgcacaggaaacagccagactgtcaccgagtgcctgcagagactagcggaaatcatcgatgagaccaacacactgctacagaggatgtatgagaactgcgatccatacgtcttctacaaccgcattcgtccttatctagctggaagtaaaaatatgtgtgatgccggattgccaaatgggctgttgtacgacgacggccacaatcccgagtaccggcaatacggagggggcagcaacgcccaaagctcactcatccaattcttcgacattgtcctcggagtggaacaccgacccaccggtacaagtcgcagcgacagtgaacaaagccccgaagccagcaccaaatcccgaaacagcttcatccacgacatgcgcacctacatgcctggcccccaccggcgcttccttgagcatatcgactcggtagcgaacatccgctcctttgtcgaggcgcgacgcggagactcggcgctgtgcattgcctacgatgcctgtctagccatgctgcgcgtgctacgtgataaacatattaccatggtgtcacgctatattatcttacagtcccgcagctcacgtcagcctgccaactccaactccccagcagcgacgaatcttgcaagcgccgctccgaccgacaagaggaagctgcggggtactggtggcacggcgctcatcccgttcctcaaacaggctcgagacgagactggagagcctgccattgatgcctgggcacgacggttgctgagcaatggccctgcagataaaaagttcgctgcgctgagcaaggttggcgagcatgcggatggtcatctggaggttgtcggtctctgtggcacatggacagctgaggaaaacgagggtggaatttgtcactggtagtcgtataactagtttcacgtttgcgtttagtcttccttcgagcgtggcattgcatgggatttatgccgtacgcggcgactggtgtttgggaacttgcatgaacttatggttattactatgctgtataaaatacattccacctggctgtgagaaagataatgctttttttgtatggactatattgtacttgtacccatagaccacactatagaaattatctttcgatacccctgtacgaatcatcaacattcatcaacattgatgtaatgacgcttgtccctggcctgaacaaaactcgtcatgcacgcgcgtatacctgatattcacgtgacgtgacatcatccaatgacgtagttcatcacgataatggtggactttgtagaacttcaatcttggaagaccacattggcccattggagaatgccctggaacatgtggcttgataacaaaatgccttgtgtatataagtggccttcctgccacgactctcagtaactaattcatcaaccacttcaatcctcaaacatctctcatatcttcactaccactaccacttccaaccatcatcatgactaacaacactggcaacgcctcgaccaatgagtcgtacctcgagcaagcctccgatcttgcttcgcgcgccatcggaaccgtgactggcaccaacacctccactcaggtaagcaatccactttaatcccaacatcatcccactgtctacaacaactaaccctacctcagaccgacgaacacaagcacgaagccaagcgagacgatggatcctgggaccagaccatcggctccgccaaggagtccgtcggcaacctgatcggcaaccagaccctgcgccgcaccggagccgagcagaacgccgccggaaaggagcaggaagccaagagccagctccagaactggggcgagggcattgagaaccgcgctcagggtgctattggatccattggtgctgctgtcactggtaaccgctccgaggaggataagtaccgtgacttgcatgacgagggaaaggcccatcagctcagtgctgaggctgatatgatcaagaagaatgctgcttaggcttgacttgagatgagatcttgagtttgggtttttctttggtcgcttgtttcattatctttctttggtcaggcctgttttattatcacgacttctacgatatgatatccaattgatgccatgtttttattttacttctatcttctgcttgtaacagtgtatgatatatatgtaacgagtcaagttttataacgccatcacctaactacagcacgctttacctgagaactcttcctctttctctatttgagctatggtaattaaggcacaggtctcgatacatgtgaattctacatggatcgaccgcagatcatccagcccctctatgcaatgctacatcgacatcccctgcatttccccgcaaagaagtaataagtaatttcccgaggaccagacagattggcatctgattccgaggctggagaagatctagaaactcggaattttacgaattaaattagcaagctatttggggactaattgtatattccatgccactgtagactaatgcggagagatcttagccaagcaggttaagcatttgatataccgactctgccccatctgagtacctagtctgtataccttttgtctctttcttctctgcacttgacaaaatgaaattcacgacagctttcctctttgccgcaacagcctggggtgttcaacaccaccaccgacgagataccacaaataacggtatcaaccttagtgcaatcacgagcgcactgtatgtgactctttccctgaatatctttcaacccactaacaatcccacagtgagaatctaatggccaaccaaacagccagcgcgaatttcgccaacatctcgccgccgcccaagtcgctcatccccgagatcctatcagtcgtgcccgtatccgtcatctgggaactcatcaacccagcggagcgcagttccctcgccagccaattcaaggccggtactaccccagcctggtacagcgctctcccatcggatgtgcaaagctacatgtcggtggtcaagtcgcagatctcggcgggggcattgacagccacaacgtctgagatcaacgctgtggcaaatacagggactgcagcgactgttacagcaacagcctctgtgaccggtgccactgctggaggattggcaagctcgacttcgtcgaagggtgcggctgcacagcccacgggcctgaccgtgtcggcgttgggggcgctgggtgtgcttggactggcactagctctgtgatggaaggatctacacgaattgcgtactttttacggagtaaatacgattgtgatgagagatgttttccgaaattcaaaagattggttccgtttacacgtgaattcgagtataattatttccttttcgcttatcttttctatacaatgcacgtatggtggagctcaagatcgttacattaagcacatgccgtcccttttcttatagattgaatttaatatagaagtatgcaaatggcatcatggtataaagtatatgcagggttcttttgtagacaaaagggacagcctttgccgatcactactaaaccgaacctctcctccgaggttcagggcaggcattgtgagacaagcaaatgtcgctaaccccaaaaaagggcaaaaaagggatctactcgacgatcttccactaaaaggcgacatcttgaggggagaagagacttgcggggaaatgctcgtattggattctcttcttctccattcgccattccttccatgtctctcacatggcattgcttatccctcggcctcatttaacatctagatcatatcgctattagcggcctcggacaatttccacaaattacgctaatgagagttacatctacagaaaacagaccagcctcctataagacactggatgtgtttgcctcttcttctctgctcaatcctcacttcaatataataacaaaatgcgtttctctcggatcctgttccctttggcctttgcccccttggctctagctgctcccgagcctcgtcccaaccctgtcgctgcgccagccccggccaccactggtggtctactagaggagctgcctgagcttcttagcggcgcccagagcctcctgagcaccgataacatcaacaagttggatactatcctcgagggtgcggccaagttgctcgctgccgataatatcgatatcttgcaggatatcttgacgaacgcccacagcttgttgaccaagagctttgtcaataacacaactacgctcattggggatgctacaccggtatgtactgctttttttgcttttgctttctgaactgtgtactaatgtaatatagctggtcgaggatatttctaagcttctgggtggtgtgctaggatcactgtgagggttgataaaaggaatgaatcatgataatcactttagttatctttttattgcagttatagcatctcttgaatgggtgtatgtaaacggaaattcaattgaaaccttcaaaatacacaaaacaatcatgtctttcataacgatcgggtatatacagaaaaatattagactagaacacagaatcacactcaaccctccttcctattcatcttctccttgagccgatcctggtagaatctcaaagggtatgcccgccatttatcaggcatagccggataaagagcgaccgagaatcccatccaagtacgataaagagcccgagtcttaaccgtcgagcgcagaccgtaggcatcacgcagactcggaggcagcatctcaaccgtaatgacatgcaaaaaaggcttcaaagactgcacccagcgcggcatatcatgactctcacgaagatccttagcaaactgagccgcatccgacgagacagtcaaccgatggacctgatcatcccagtaagaccagaactcctgccgggattccggccacgtaccggagggaacgcccagacagtccatgagcaaggtatactcgccatatgcgcgctgagcactggtgtagtccacacggccgtagacacgctggtagaaatcggtcgcagtcgcgtacagcgtcgccgccatccacagctgcagcggcgggtgctcagcgaatcgattcgagcggccgcctagcaggggcggcttaccatcctgcaggaggtcgatgaggactttgcgctcgtcgcgggtgccgaagaccagacaggagatgtagctgatattggcttggagagcgtcaataagctccgtggctagctctttgtggccgccgtggttggcgcctgcgtcgcggatgcccggcatggcagcttgtagtagtagcgtcgcaccggatcccgcgaagaggatgccctcctgcagcatttttgggaggacctctagttgctctagggcttggagccgggatgagacgttggtggtattgcttgcggtcgcatcggagccacgtgggtaatcttgggatttctcatccactggggagacgggaggtgtagggaaagacatggttagagagttgtcgacagttgtcaatgaagctatctgtgagtatatgatcccattaatattgaaatattccaatgcttccccagaaatcccccgcaaaaccccgaaaatgctccaacgactaaagcgttgatcatctcggcccatgtgaatagtgtcgtctttcttagaataagccgcggctggcagcagatcgccatctcctgaagcgctgatccctcccctcttctgcgttattcaccaaagaaagcaatcctgctccgacgaggagcccgctttgttcctttttgtctttttgtcttttttttcttacccacggggtcccaccggtgcatggagaggagacgaagtccgggggtgctttgcgctaaaatacatatacgcagaaccttccccttccaaggtcaattgaaattgtgcgatcatgggtaaaaatacagatacaccagcatatctgacttcagatgatgccaaatacactctgggtattcatcgtggcccgttgatatccaagggcgatgaaggcgcccagctcgcacatgtcgagtcagccgggggtctgtcattagagacgaggaagctgaagcgcagtgagaagttccaacgccattggaagcgattctggtgtctgcatcttttagtgactgtcatcttcctggcgattttcctacctgtcttgtgagttgcaagtcctcctgcgaataccaaacaaatactaattgcaatcagtttcctggttgccattccagccatctcacaaatggtcgtcaacaagtccgacctagtattggtcaatgccgcagtgttaaatccacgaccggacaagatccaattgacgctgttgtcggcattggacctcaaaatcgcactgccagtgcgcattgatccgatcacgttagagctgtttgtgcgtgataccggcgcagagaatgcctggggccaggctgatatcgacggcaaagtcgtcaaaggcaacaccacgctaggcgtgaccaaggtccagacgccactgaccaatttgaccacctgggaggagtacgtgcacaatgtcgtgtttgagaaggagactgcgctgtcagtcaggggcgtaaccaattcatacttgggtgtgctcaagtccaaggtcactatggacaagaatataatgtcgccaggtaagcgaagaaaaataaatcaccctagaagtgaatctaaccccattagtgctggacaaattcaaaggattcagtatctccaacagcgggctcgttccagcccgcaaagacggcacaaacctaatcgggaatgtctcactccccaacccgtccgtattgactctcgatattggcacgctcgtcctcgacgtgaagagcggcgacctcgtcattggaaatgccaccgtcaaagacgtcactatcaaaccaggcgacaatgtcttccctctaaccggaatcctcgacatacacacaatgattgagcacctcggagaaatactcgcgtcgcagacaaaggccctaacaaccggaaacttatccttggatacagtaacccgaaccgtcacctggaacggcacgctggtgccatattacaccaatgtaatgaaacagctaacgctgacggccaacgtgccaatcgccgatcttgttaagaacacagttcagaatctgcttagcggcaatgaaagcctcaccgacattctcagctcagcaggtgacacaagtaacttgctcggcaacctcacgagcagcaatggtgacagcgatacctccgagctcgcctctaagatgaaaacgagtattgctgtgcgcgatatgttccataacacgcacccggttaaacgggatctaatcatcaactcgctggctgggatgtacaagaagctgtgagctgccgatcctatttcatttggatttttcctatttttcctatttttcctatttttcttttcggcatttgctttttctttttcttgtcgaaagggtctccggttctgggttctgtgtacatggttgcgcgatgcttactgatgcttatatgatacttgattcccctttgggttgtggcagtggtctttcatctcgaatggcgttgtgggagtgtattgttgtctttctctcttgagacataaagaggggtcttaaagatcttgtttttcctgtcgactccatttctgaggcagtgcatcggctctgtatactccgtacatggctgcctgttcgggctcgggtcggtgcagatgataatacatgaattataaatcaaatgacgatataaatagatggtccttgtgtcgttagacttgcatattgtttcactgcaatgggcagtcagcttgacaaaagcaccgagcaggttgccaattaacttatccgaaaagctgtaggtcttttagttgctgaattgaatgtattagaatactaatgggtccactctgtagacgtcaacctcagacgagattccagttctggaaaatcttatagaatggagcacatatgcatctatggccgtggttccggatccagggcccaattgactgccagtcatgttcgatgataaatcataaacgatgtttgctgcccaaggcgtcctggatacccgagttgaccgagtcgtcgtcttgtttagtgctgaccacctcgtatactaagtttactctgtgctgatttaaattttaacttggttttgttaacattgagtgtgggtattgacctatcgtcttgtacagataatcatacctgaccggttgaatcatggaacaagccccttccaatatggatcccttatcccacgtaggtagtacccgcgtctgatacccaggaagaatggtggtgcctcttccaccaaattgcgcgacggaaaatacggaggcggtggcttcagcgtctgtgggaacagttcccggggagcccagtgatctgcgggagaggtagcagtaggaagaggcgtagtaataggaagttgaaaattaggatcaaagctaatgaggacaagagcttgttgattagggggaagacccggggcgtcaatcgagtatataatcgaacggtcgtctgcaatgcttttcacagatccagtacgcgggcctggacagagcaattgctgtaatgcaggcggagcgtcttctggaggccacatgtacacgccacgacattcaaagcgttcctcggaaccttcaacaggataaccatcttggtccacctgggtgggctggaacagttggttgcgaggtccctcaattccctcctcgtcaataggacatttgcgcttgcgcgacaccgtacgcaaccgaatccgatctcgagaccgtagattatcaccgacaggatcgttaacaatatccacaaagctggatgcaccgagatggtaactcttgtgtttggtgcgagctgcgatgaactcctgccgcatggtagagccgggctcatactcggcatggtaatgccgccgcaacctcttcgcaggtcggtcatcgtaggggtgctctgcatccatagatacccagcaaggactttgtgtggcgccttctacaagaggcgctagagcttcttctggtgtgggaagtggctgtgtgtagtatgtacggtggttttcactcttgccatcacgccactcacggcgacattcaagtatgactgggcggccagtcctctcatccgtgcggattgaaagatcagtccacatctcattgatcgggccttcttgatgctctcggcgccacaggcgacctttccatctgcggtattcatcgcgaggggcttggcagaaccaatagtagaaagaggagtgcacatcatcgtctgcggcgtcctgcgtcgaaactgcatagagatattcaccatgcatctcaaaacacagtgtttggccaagatcgccagcgaccactcggtcgagttcgaagttaataccttcatacgattggagatccacaccagtaatagaccacgaaccctccgcggaaccatcgccggccataaatatgccataccagatgtaggttccgcagtgtcgcacaaaaaccggtgcggatgctgggattggctcatggagtaggaaccggctccgtccctggtggtattcgcgccacgccatgttgaccacgagcaatgcgtcctcggtcgcgttcgcatcggccactcggaagatgagaatgtcatcgctgtagctcaatagcgtaacccggtcctctgcacccggctccacgggaccggtttctagcagccgtgggatcgcatcacggaggtccatgacacgctccctgaataccgtaccatgtaaatacagcagacggatccaatggtcagaacggtaacataagtggccttggttgtaaagaaactcggacccatagcctacgcagaccgccgagtacggatttgctgttgccacagcctcgtggatcgcaagccgatgcccaacagcctggcgaaaaccggactgggccgcgagggcagcctgaccttctttgctgtagcgaaaaacattctgtaagccgggatcagccttgtaattcaagcgaggggctggcttggcttacctcgacggttttgcgggcgatctgttcacttcgcgacagatgatatagggcacggctagtgcgactaaggtttataaaatcacagtcgtccagcagcgttgcgatctggtagaacacatcatatgaaagagtgtccagactcatggctataagtgccaaatagtctgttgatttaaatagtctcaagggagtgtctcagacagaagggcaacagccataggaaaggaaaaataaaacaaagtccatatcgaaggtcataaggaaagaacgagatttatgtcagagagaaagaagataggaggaaagaggaggtgagaggctcaagtcatgaatgtcctaaagaggaaagaacaggcccacatgaaaaccatggaaccccttcgtacaaaaccttggatgctggcagagcctcaactagaccaaaaatggaatgacaaaccaattgtaaccttggagccttcctcgaaaaacttatcgccatggcttttacagtaagaaagcaaaagcagacatccccggatcacggagcacgcgatttggcaggatcggatccttgaggctctgtttttgttttcagattacgactaacatctccgaaagaatgcggctcatccgtctccattaggactaagcaagtgccggatctctcgtaacacgggttaggtggggttcgcaggtagccaagaatcttcagtccttggtcctatcggatctccggtgtgtgtgacctccgtgaataaagcgccctggtaatatccatggatgggctatacgtatacttcgtaagtgtttcaaggtactgtaacttgacgcatcctacatcatctagttatgtaattgtacagcgccccattaaaaacgtctctcgcaagccacttgggggcaaaactagtctcacgtacgcattatgcatgctaagttgccccggtctattcttgggcccctaccccgtagttcttcctacttctactcctaaggtttcctattgatgtcggaatcaggtgacgacatgcatagtcacatgatggccgaaaagtcgctgcctaacttacagcctgaggctgctttgtttcatgattacacattagattacgcagtacaacgcatggtacgcattactagcgaggagggccattactggagtcattcaagcgaattaaagtgatttacctgcagccctaccggtggatcccatatctaccaatctccaaggagtgttctttgtatagtccgtacatgaattgcccggggcacccaacacttgtcccaatgggaaagtgaaaggtcccatctgcgtgtgcgtgacccacccggccagccggattgcttttaaactgttcaacttcttcgtcttccttttcctctcttccatcaggagattataggtcgcatctttgaagagatgaattatccaccgaggggtccacctccaggacaagggcctcccccatggggaggatatcaacaacctccccaatggcagcctccgcctcggccgtatcctcctcagccctacggtcatcgaccccaatcatcttattcgggtcctggtcattccccctacccatcagcttatccccaatctcaacctcagtatccgcaccctcagtatcctcagcctcaatatcctcagtatcctcctcaatccccgccatacggccccactccacctcctcgtcctccctcacaccagcatactctgagtgccccgcagaatggtaaacttctatgccaagaacccttggcggcgtcactaaccgttgacaggatatcctcgtccaaactctccgaatctgcccccaaccccaccccataattctcagcaatttggtggaggtgctccctcgaactacaggttccagtactcggattgtaccggtcgccgccgggctttgttgatcgggatcaactacgcagggcagcccaatgcactcaaaggctgtatcaatgatgttgctaacatgtccaacttcttgactcggaggtacgggtacaagcgtgaggacatggtcattctcaccgatgaccagcggaatccgatgagcatccccaccaaggcgaacataatacgcgccatgcagtggctcgtcaaggacgcccagcctaacgattcgttgttcatccacttctcgggccacggaggtcgtactcccgatctggatggagatgaggacgatggattcgacgatgtcatctacccattggactaccgcgtcgctggccacattgtggacgatgacatgcatgccattatggtgcgtccactgcggcctggcgtgcgattgacggcgatcttcgattcatgccactcgggcactgcattggatctgccgtatgtctactcgacgcagggcgttctcaaggagcccaatctggccaaggaggccgcccaggacttgttcagtgcattcacttcatatggacagggtgatttctctggtgtcgcttccaccgccatcgggttcatcaaaaaggcagtcatcggcgaatcggcccgtgagcgcaccatcacgaccaagacctctccagccgacgttgtgatgttttcagggtccaaggacacacagacctcgtaggtggcgttttaaaattaaaattaaggcagataagaatccaaactaacctcgaaacagggcggatacattccaggacggacaggcgcgtggtgcattgagttgggcgtttataaaatcactggaacagtggccccagcagagttacctgcagctgctgaacacgattcgaaatgagctcgagggcaaatactcgcagaagccgcaactcagctgcagccatccccttggtaagttatttttcagcggtgtgacccgcgcccctggctgactggagatcgacagaccccaaccttcgctttgtgatgtaaccggggatttttcatccgagctgttatgacagacatgatcgacatgtagcaaatgaatcagctgagacttccgactcccgagttccggtgcggggaagagcctgtaaccttggcaattgtgtagtattgtagataatatgtactacctgatactgcggaaaagaatcgaaaagaatcgaacatgatggaaaatatatactagatgtattgtacggagtctaatatagtgcaataatagcacggaatacggtgcgcccgcatctcccaaacgtgtgggctcgtttgtggctgtggttctctctcctgtgcctcagctcggtggatctgcaaactcaatgggaaagattttttttttctcaagagcaaacccaaccaacatacatagacaatataggtaactattcctcccaacccttccctatctaccagtaactgtcccatcccaatgcctgatgtctaatgtctcacgtcaaggttcaagcgtttctatagaaaagtatagaaccatggcgccattacccccctgagcggggatcgggccaatcacaagcccgcaatccccagttcccggtgggaaccgcggacgcactggctctgccccttgggaaatgtcgcaactcgctatttttcgctttcgttgcgtatgagcgacgtgttggaatgggatacttcacgcaacgacctggagaatgtccgttgcacacggtcttacgaatatcgtggctttggtcagccgcgtcacattgggatcgaagacaacgtgttgccagatctttgagacatgatctgatcaccccacggcggttttttccacatggatggaccgattgtactgtttatacaacacagtatacaacacagtatacttcctatagttgtatgagcaaatactatgtactcctatactcctagtcaagacctactcgaatctcatattcagcctaataatataaaaacaaaacaaaaattacaagtcatctaagtgttaccgaactaaaatgttgatgtctctctgatccactttcggtctttttcagaattccatctgaataccctttctgctcgcattttccctcttcctcttatttccctcttcctgcaacatcacagccttctgccgccatgttgttaccgtctacgaacagttcctatacttccagcgtctcctccgagccgcatctctccccataccaacatccgccgacatccactttttcattgaactcccgccgaaccccaatgactgtgaagtaccctcgcttctactcgtcccccatggaccaagaaaccgacgccaccccggtacaaatctacggcctggagcagcgagaaccctccatccacaggggatcccccaaactgctcagtcgagtctcgcacgtcctagacgacatccgcgaagacctcgtgatagacgctcaccaaaccacggagaagctcaagcggtactcaaccatcaaccacgacggacacggtctcagtgctcccccgactcgcccagagggcccgatgacatcccacgggcccccgcggtcgcggccaatgtccatcatctccttcgacaactggtcctcgccgactgggagaatgagccggctgtcccgccggttctcggtcttctcttctcggaacaagctcaatcgctccaaggaagctagcatatcttcgccaaatctgatcggttcctcgactcagtacgaataactggaaattatcatatatgatcatcatcaaaagagagcaatttcagtccccatcggtgatcatggggtcgacgctcgagccgtcgtacattgcacggctattcatacatacatgcgcaaggggtgttccggtatactcattcttcgtttttgcacttgatgttttttttttttttttctgcgtcaatttttgcggtgggcagcgatcattttcattttattaatatcgctagttcatgtgttgaggttatgtgttgtttctacttccctctgcttgacttgcgcatagctcggtgtttgggattttgatttttggccttggaatatcgattcgcatttccccccccccccgtccccttgacatatcagaataatatactgagtatcatatacagaaccccttgaaaactaaccctgccctcgagttcaataaaatataacgctaattgcgccaccatgcatttcccaagctaagcaattgccggtagactaacgtcagcccgttagtcaatgcctaaaaataaaggctggaaaaagtccgagatgacgtattttaaatccgaccgctctctggatctaaaacaaacgcctcgaactcgcactcgcactcgcatcgcataacgtacgtacccgggttttctgcaggctgtggagaataccgcagatgcgatgccatgccaagatgggaagaatgtcctggacgatgcatggtagattggctgctgggtttggaatggtcctgcattgtcgtttggggctaaaagaagaatggccctaatgacaactagcgttggacagggatgcaggaatagactgggatcaaaattaaggagtaagtagatctctgcgtctggggtgggttcgtcgctatttactttcgatactgtgtcctttgggtgtgcattgatttctgaaacaactagctgctattattccatacatcctctccactgtactactcaatgcctatcatcaactgtctaatactcactgcccctctccctcgatccattccacgtgctcgcgctctgctgtctcgacaggcataacccccttactaacagccattctctcgaactcctcgtcttcacggtcaatgtatttctgcgggcgttttcgacaaatggtatccggatctccagtcacaatcaacgatgggttggtgcggtaataggcatcaagatcctcaagactccggttggctacaataacagtgagtaagaggataacatgcgatagctctgaacgtaacagtctccgggtagaagaagtagaggataggcaggaaaacagcattagacaccatccagacaatccaaaacttccacccaatattctaaatcccgatcggggtgatctccacaacgatgaagttcgtaatcctatatttgtcaaaacacagccaacgatgtaaccacaccacccaggcaccccgtcggtataacatcaattttctcaacctttgggcgcttggcacggttaacaccaccaacccttgaaaaataggcagagcttttcatttaacgtaatcggtaagcgagccggccatgtaagccagccggccacccaacccaaaaggcgtccatgatttagcacttagttagttcaaccacccactatgccaccaattcgctcccaatcctctagaaattcaatagagtaagagggtaggattctcttagctatttaggcttttaaaaataaagaaatctcttcaattcgcgaagtagcgcgccgttttaatgtaccacgtttaacgcttcaagaccgattatagggccactaaaatcgcgcgatttctcgcgtaaatttatctaaatcaacagaaattaaggaggaatctcttgaaacatagattctttctatagatctacgtgttttgctctccgagttagtaaacccgcaatatgaacaaatgatttcgtgccttctgctcttgatgaaaaaaatatccttggggagaaacctgggagctattgaaaacggatgtatataaatgtgtaacgtaattctcatcttttggtacattaagcgcatttggacaggcaggctggttcttcgtacagctattctcgcacaaaagagtgccgagatcaaatcaggggttgctatcgacactcaacgcatctgggtggttgatggcttataccgtaatatcgatgaaatcgtagaatctagactccaaagcggaactcccgcaccttcttctggtagtagaaagatgctaacaacccagtggcaccgagagccaaaggcatagcagccctagcctttgtcttaataatcctagggatcgcagagctcagaaggaggatgctgtttcccagggcgagctcagtgccgtagtccttgttctctttgatcaaataacctggtaacatggtcagcttcggaatattctggcacacccatggtacttaccggaataggcatatgatagaccgagtccaacaccggcaatcaaagaaggcgctgaccgcgttcgtagaaacccaacggtacctccgataggcactactttggtcagaaatatagcaattggtctcgttgcacggacttacgaagagctgcaagggtaaatgaaggatgttcggccatgatagttaagtacttaaaacaatgtagttgaagggtctgatgcttcaaaatttagaaagctctcaagtgccaggggcgcgtagatcccgctggggccgagctccgatgagtcagcggaacacaggacctgggaccatcgtagagaatcattttgttaacgacagccatttgttattgtcaattctctaaatccatccagaatttatggattaatcatacagtagcatcatcattcactcttatatactgaccgtaacattaatgattttatactttgattcagcttgggatctaggaaggagctgttgtttcatgatctccatcaccacgccactcgcgtatgtcacttgcctcctttacattctataatccattccattcctgtaacaagcacatacgaccatagggtgtggaaaacagggcttcccgtccgctcagccgtacttaagcnnnnnnnnnnnnnnnnnnnnnnnnnnnnnnnnnnnnnnnnnnnnnnnnnnnnnnnnnnnnnnnnnnnnnnnnnnnnnnnnnnnnnnnnnnnnnnnnnnnnnnnnnnnnnnnnnnnnnnnnnnnnnnnnnnnnnnnnnnnnnnnnnnnnnnnnnnnnnnnnnnnnnnnnnnnnnnnnnnnnnnnnnnnnnnnnnnnnnnnnnnnnnnnnnnnnnnnnnnnnnnnnnnnnnnnnnnnnnnnnnnnnnnnnnnnnnnnnnnnnnnnnnnnnnnnnnnnnnnnnnnnnnnnnnnnnnnnnnnnnnnnnnnnnnnnnnnnnnnnnnnnnnnnnnnnnnnnnnnnnnnnnnnnnnnnnnnnnnnnnnnnnnnnnnnnnnnnnnnnnnnnnnnnnnnnnnnnnnnnnnnnnnnnnnnnnnnnnnnnnnnnnnnnnnnnnnnnnnnnnnnnnnnnnnnnnnnnnnnnnnnnnnnnnnnnnnnnnnnnnnnnnnnnnnnnnnnnnnnnnnnnnnnnnnnnnnnnnnnnnnnnnnnnnnnnnnnnnnnnnnnnnnnnnnnnnnnnnnnnnnnnnnnnnnnnnnnnnnnnnnnnnnnnnnnnnnnnnnnnnnnnnnnnnnnnnnnnnnnnnnnnnnnnnnnnnnnnnnnnnnnnnnnnnnnnnnnnnnnnnnnnnnnnnnnnnnnnnnnnnnnnnnnnnnnnnnnnnnnnnnnnnnnnnnnnnnnnnnnnnnncgccggtgagttagtagttgggtgggtgaccaccagcgaatcctcactgttgtatgtttttttcgaatgctatttatatagcaatagtcattataatagaacggtaaaatgcggtgcccgtttgagttgctgcagcgtcattcgcttcagggttgcgccgtaggttgtagcaaacacaaacagtttgccctgacgcaatcaatttcaacttttttgtgcttactttatgttatggtgccgcaagtctccctaatcgctgatgtctgctgcaatagtgcctttgacctttgaagtgcctcgagcgtatggttataaagtatgagagtatatgacccttctcgatcaaatctctattctttacaaaaagaagcaattcatgccaaacattaaatcattcttttgatattatagttataattcgacaatcatggaaaatcttcccactactgcgaagacacacattgtccctgccgcccaaggctacgtatttgaggttatgaaaggggagcgattccgcattgttgacatacacggtctccaaattgttgattttatggcttgggttaacgagccaggcctaaaagagcatgttcggatgtcttacaccaggttccgactgcaaggtgtcagtcccgacattggggagcatctccgcaccaacctcgacgctcctgctctgactatcattgccgatacctgcaaagtccacgatatgacattcatgccctgtttcccggagatctatgctgaatgcggtctggaaggtcatcggtcctgcgcaatgaatatcactgaggccatggagccatatggtattacttcacggctcgagcttcctgacccgttcaaccttttcatgaattcgcccaattacactttgaagcctatcagcaacagcaagcccggagactaaattgagatggaggcgctgaaggacttgattatcgggatttcgtgctgcccttatgatcttgtgagtcttctgtgatcaaccgagcgtgaagctcaagtatactgacctctcattttttcagggaacctacaatggagacagacgacccccatcgcgattattacagggttgtaatgagtaccggtgcagatcacccaccgagtggaagtataggctctcattggctacatcatcatatccaagagccccatatcatactaagttgatcctacgcaatgtgacaataatcccgaaataattgactggtgtaacctgtttcatctgcatccctcgtagaaatcagtctaaacaaatataacgcgcctataatccacacaaaagccttaccataatcaatgttttacttaatccagcgtccttagaataaaaagcccacaattgcagaagtccggaatctttctaacatttttaacgtcgtctaatagcagtaaaatctcgtagcttatagacatataaagagtagagaaataactgtctagcactttttatgtctctataagtgaactatatggaaatctttccacttatatatacaatttcctgctcttcttactctcgtcttttaattttagtaaggtcgtggtacaatatataaatgtcatgaagatagcatagccgaagatcaatatcccgataactgagaatctgaacacctagttaattaaacgtggtattagagaagttttaatctaaaatcttgattcaagatgtcttttttgaacctctgttttaaagtcttttcagatgctcttttattattttttggatacctttacgtatggctttttgatggatttttaaatgcctacaaatatctgtttagaaaaccagctgtaaatcaattaacattaaatacatgtttcaagtgacctgtttccaagcagaaacgttcttcttcacaaactcctcccacgtagtaggcttactatcgagaaggctcaggctgggctcgaggggttctccgaggtagtagccaggctcctccacaaatagctggttctcaaggtactcatcagcgatagcagcaggaagggaggccttgtattgatcggaagagacttggacgaagacagccttcttgccagtcaccttggagaaggtgtccacgatctcctcgggggtgtagtacttcgcagcggccaatatctgcttgtccttcagctggccagcgtgctttatggcagctctcacgaagagacctaggggatatgtgagttaatgcgtataaaaaaaaaagaggggagctaggagaggtctcacctgtatcctgggccgcatcgaagagagggaattgagcctgctttcccaccgggtagaaaagctggtatgacccatcctcagcacgactgagcatctgggtgaagttgctcatgtagtaaccgggaaggacaaagctgcatccaacgcccgaagcacgaatatacttctcgatactggctttgctatcgaaatgaggcacatggctcaggcgacccttggtctcctccgtaacatggtggagagatgagaatatcaggtgagaaacaccaatagccttggagacatcggtcacattcttgccctgggagaactcaatgtcggggttcatagtctcccagtagttggtgacgaggaacacagtgtgggatcccttcaacgccgcagtgagagtgtcgactgagcccagatcggcctatttgaatgttagtctctctacctatgataattattcacaaagacaacaaggaagtgaaaagagtaaaacgaaataagaaatcccatcttaccgagacaacatcgacaccgcgcttggccaggtcctgtgccgatttcttggtggtgtcgcgggtgataccccggatcttgaattccttcgagagctgggtatcggcgagaatggcgtcgatgacggaaccaccctggtttccggtggcgccaaaaatagtgatcaacttagacatggtggataactgatggatttagcttggagaacagaggaatttgggcaataacacagtaatctattctcgttagaatattgtatctcagttgcgtctggtgttcttatttaccgtttccaaggctataagggatgttagaagatagtaaagtggtttgaagagaaggcttaccctaagacgatccggccaacgaacatctgcgccagactgaacgaactcgcctgaagaatacctcccactgccatgatcgtagtccccagcaggatagctttcttccggcccagatgctcaccaatagtgaatgcgacaagcgctccgaagaaacagccaatatcatatatcgccgtcaccgtggatagcatcgttgtcttcgtaggcccgaccagatcgtggacttcaagaaaatcctgtgtgatcacaacgccgcatgtattgaaatcagaggttaattcaagattgcatagtctccagagcactcactgaagactccttggtcgtaaccgaacaaggtcatatcggttgcgcatgccacctaagacaaaacaagtcaaattgattccgatcaaacactacagatacctctagtcataccgtaatccagaaggtcagccatccccctgttaacccgaagtagggctttttcttctgcgcgacggtagtcatatcgtaactaactataaagaatcaaaggaatggaatctccacaccgtgcctacgtagaagtgaaacttcatcctttatatactagtctcgaattaattatgtatgtcttggatgtatgcaagggatgtgtttacaaagagatccggggaatgatctcgggtccgccccgaagtccgggggaaaatgcggggagaacttccgctggaataaggccgttaacccaaaagggtatcccgtgggacctgatcgtctgggatttataccgcatctagtagattagattcgttcggattcaaggaaagattcttacgtcactgatcgtctggggggtatgtcatttcggcattggaggaatatcgtctgctataagtgccttttatggactaatgaggtacaatcctaggaaaagcacgtaatatgcagatcaagtcgactgaaagaggtatacatagatagtgtatagtggaaccactttttgtgtacgcagaccttatgtaggtctccgcctccgctcctaatccctgatgtccatggcacgtatttttgaacagatgatattgcatgcctcgtgagatggtataggggccatgagccagatgaaaaattgaagcaccaggaaacaccgtctgaaaacaacaccagaatcaacctgcaaagcatccgacggaatgcaaacttgaacgcaacaagcttctgaacaagaaggggcgtccgcaaaaattcaaaataaaccaaatccacgtataatacgctataataatcccaacccgacgtgtctagaacatggagccagtccatgcagctcggagacgcacgtgcggcacggcatccccatctccgacccgggtcctgccctatctataaacctcaatcacagagtcacgctctcaagatcacgcatgacaatacccatctgagcgcgcttggctgcctcagcgacaagactgaaatcctgcaggaagggcgctgtggcagttgggcccccgagaccgtgtatctgatgggggtaggcatcggatgtggacgccgaagtgggggctgcatatgcatgggtgttggctgcgggggcgatgggcaggttactcgagttggatgtgttgccgaatgcctgtgacaagggttgcatgggaggggcggaggtttgcggggaacaggcagattggagcgaggatgaagaaaacatctgcctggttgcattcgatgcgacttctagggtattttgattttgagactggcctgccatggtggactggccggttgaatggttgagtgttgaggtaggttgagtttcttgagggttgtagactgttcgcatagtcgagtccatgacgtgactaaaacggtccgatcttgcaagtgcaggaagaataggccgcactgaacgtggacttgggtatattgatagaacggggagagggtttgttgctatggacaaagatgcgatgggagattaagaatggaaaagggagcagagtggcaaggaaattgaagccgcttcgaggatgcaaattgcaggaagctaagacgaatttagatggcgggggcaatttccactaggcagacgatggacgaatggccgaatgatagagacagaagtgatggaagagaaagacttgctgtctaaaccttgcaagacagagatttacacagaatccctcaggggtgcatatgaccttgtgaaggccaactgcagtttttcctttaatcccgagatttgtccgaggtggggtattgtaccgtattgtgacggtatctccacgcttttctccacacaatattacgataccatcacgtgggaatatacacgtgacgtttaattggaacagggtaactactacagttctctgtagagttgtagagtatgttagaacatcagacaatccaaagaacaatgcacatacacatatgaaaaggcccgaatatcgaatcccgagcccgagagaccccgtaatcagcccactaaaccttggaatacagatagtgcctgaggcaacactccgtaccgaggtctacgataagaaattgataactgatactgatattttttcccctccaagcactaagccatatactaccatggccgacgactttgattcagggaacctattccaggacccggaagggtactatcccgaagaggagccgcccacattcgccgagcacaccatgctatcaggccagaaagtgcgcgtccgtctcgtgggcagccaccccctctatgtatgatatcaattgacacgaccagctgaggtgcctacttacagaccttgacagggaaatctgctatggaacgctggacgaaccagctcccattacattgaggagcacaccgaggatctcatccgaaacaaggatgtcctcgaaatcggtgccgcggccggcgttcccagcatcgtgagcgccattcagggcgcccgcaccgtggtattgaccgactacccggatccagatctagttcaaaacatgaagcacaacgcagagttggcggccagtgccattcccgcgagggaagacggaaagccccgcctccatgtcgatggctacaaatggggcagcgatgtgagcccgctgcgagcgtatctgcctcctgctgccgatggctctccgtcgttgtttgacgtcttgatcatggcggatgtggtatacagccaccgcgagcacccgaatctgatcaagactatgcagcagaccttgaagaaggacccgaaatctgttgctctggttatcttcaccccctaccagccctggctgttgcccaagactgagcaattcttcccgttggccgaggcgagcggtttcactgtcaccaagatctttgagaaggtgatggatacggtgctttttgagaaagaccctggcgtaagtcattttgaggattctcctttggattatgaccgtgtactgactcttcacaggatgaaaggctccgaaaaaccgtgttcggatatgagatccgatgggcgcaggatcaactggaggattcatccaaagctgtttgagtcgttggtttgatacttcggcctttttggaacgatgacatgattacatgacaaaagttcgatagatttgtatacattgggatagagatatgttctagaagatatttaccatctctaaatttgcgccaaaagcttcatgttcatggggtcatcgccgtaagtgagcaagccctcgagcttatgtaataatcaggtgattctcagtgagaaagccatctcgcggcctaattcggtgtatatgtagctttgcatcgtgtccgtactagagtgctcagaaatttgcaatttacaatagcctgccaataatattctgcatgataatgcaaatacaagttcttcaagggtggaaggtcgtggatatagatgcgggtcacatgccacaacccccgcaatgataaaaaaagttgtttgaacaaacgcacaagtcaacgatgccggtatgtcgacaaaccttatatattctacaatcaaatctaacatctacacactcagctcgttattttaacggggtacccgtgctccggtctcacctaccgcgccaatcaactcgcatctctgatcgagaaacaccaagatgaagtattcgcagcagccgaagcaggcgcgcaggtctccttgaagtcccgatacaaggtgcacgtggtcgcttcacacgattcctctcatccacggattgtctacgaccatgcccgcaccgagaaggaggcacgcggcgtcgcctacgcgcgaaccaaacgcgtgctcaagcgggacagcatcgtcatcctcgatggaatgaattatatcaaaggatggagataccagctgtggtgtgaggctaaagcggcgcaaacgacatgctgcgtggtacgcgatcggaagatactaaatgaatcgcgacacccaatggctgacaagtctgctccaggttcacgtcgggacacccgtcgaccagtgcgtcgccaacaatgacgcccgactacgccgagatgccagcaagcaagaaacaaaccccaatacatccgatgcgcagacctccgaatcccaagatacccccgcacccgactcaacatccaccgaggacaacgaggaagcctacccacccgaactcctcaacaacctcatcttccgctacgaggaaccaagcacccacagccgctgggataagccgctcttcacagtcccctgggcggacgccgaacccccggtttcagacatcttcgaagccctgaccggcgtcgtcctcccctcaaccgaagcacccaccgaaacccccaccgcaagcctaatcgacgccctcaaatccaccaccatctccgatgtcgccagcacagcaaccggcacacgagccggcggccgtagcgggatctccacccgcgcccgaatcatcccgcaccaagccactgtgcaagcagcggcaacggactcgaacgcaatgtacgcaatggagaagcggacatcggcggtcgtgactgtgatccgcaatttcacgcagacatacccgtcggcgcaggtagctcttgcgcagagcagtcgcagagatacaatcgccattgacgtgcccgagactactattcccatacttattccggctcatgttgccatggcgggaacaacggatgagctcgctgctgctggggggattctggcgttgccgcggctgcagaggctgcggaggcagtggattagcttgcatagatcgtatgtcggtcggggtcatggttcattggcggcggatcagattggagatgcgtttgtgcggtttctcaatgctgagttctcgggtgcggttacggaggctgcggaagaatagatgcttgtgcggtcttgttcattatgaaaagtcagttggtgtttatgagaaaacgaggttacgacttggatacccttcagatctacagctgtacgtggtttaaaaggattgcaaagtaaaaggtcatttgaaagaagatacaagaacgcaagactatctatcaacatgcataaatcagaatccaaccaattgttggacaatacatggctatatctctctttactgtcattcttcttccccttgagacactgtatcccgctttgctgtttcctccgcataagtttcgggtcttttgtgtcattggggatgattttatccatagatctggaattcaggccaagaagctcagaagcccttggtacgaatccagatccccatgtgaggagcagcctgcgatccggagcggatcaacaagctctcgagcgtggggtggagtaccacgcgtcctatccagttcctggccgtaatatccatatctggaatcgaatcgtccttgtccgatgatgggatcaaacgggacaatccttcggccgaagtccattgtgtactcgcgagcgatcgcaccgggttctccatgtaaaagtgcctagccagcaagcacagtctagccggagtaaaaaaggaaatcaagaaaaaaatcctccgtgaagtttgttcgtgtcgttcaaaagaaaaccgctgttctcctccaggacggagggcctacagctccttaacccttcaaggcaatccattgggcatgtgggaaacagcctggctggcctcaatctggcggtagttcaagcccaaagtgaacagttcctggaaaccggcattgaccttctcgtgcataatggtatccttaggggaaatggcactcagctcctcgagcagacgcgagcggcacttgaagaagttctgctcggcgttctggaggtgctggctgaggctagcggaagcttggctggccttgatggagctagcctgggagttgacggaccgagtgcgcttcatggtgggcgccggggtggcaccggtgactcttctcttgcggccagtgggttccttcttcttgatctgaccagcaccgggcgaggtctcgggcgagctgtggcgctcggaagtggcatagtcgtgcacgcgacgcatgtggtcgtaaaggttccatctccgtgggaatccatttcctggaacggcgcgttcacagccctcccacaggcagaggtgggggttatctccatggccatgtagtccgtgagcctcgcgctcgtggcggaacagacaggcgttggaagagaagcgcagctgggcatcgatgcaggcggggaccttgcagcggtatggcttcagatgggaatccaagtacttgctgttagttgatattggttagctgggttcattgcaccaaagatttcatcacgggaggacttgctggtaagcgcatttttgcgtggtgggtgggtggctgcagggtttctctccagtggcaaatgggcagtagtattttccatcgctgtgggtggacatggaataatactggtgctctcgcgggttgcgagcctcaacaccttccttggatcttgggcgggctggctctctcactgggagggtagggaagaaatcgggctcagtcttgatttgttgctgggaaacagatgacaacgccgaacgtcgggatggctttgagggtctgatggtcctacgatattgtggttaggtttccgatcacatttgtattctgggtgtacctctttctgacactcacctgtggggatctctgtcgttgatagaggagctggggaacaagggctccgcagggttgagtccatgggtcgttccaatgggcgatgtggtgaaatctccgaggagtgcatcatcgggggccatgaatgaagagtatcccgcgtgtgagcaagaaatatcattgctagcgtcggtcagtggtggggagaccggggcggtctggtaaagacctgacgcgtattccatggtggttcctgggtaatgggtatcatgcatcattggggtccactctgggcctgtgatatagtggccgtcctcggtactgtgagagctgtgcccgatggaaagagcatcatctggggtgccgtttccgacacagacatcattttcaacagaagagaaatccaggaaggagttataaagatcccgggtcatttcatggtccatgtcagggactgctgggaagtccatgcctgggtacataatatcatttggtccgaccgtgggggtcatcagctgctgtgatagagagaaagaaagcatgtgaacctcggatgagtctgattttgacatggcctggtcaagggagtcttggcggtttagtgtccagtctttcatgtcctgtggatttccatgggctgtacggatacttgagcacaacgaggagctgtcatggctcgaaatttcatcatcctggattgatctcgaggccatatttgagattcctgaaaccatggaggtatgcatggactgtgagatagagacacgatcagagtcgctggtgttccttggagacattgtgtgtgtggatgtgtgagggaaaaacactgtaaaccaggagttagtatctactactcctcatcgaatgaaataaaaagcaaaaaaacagaacaaaaatgaacaaaaaacaacagctccatggtccagaagcgacgggatacctagtgagagtcagtaaagagactaggccgcgtcacgatttagttatacgcaccgaagtcgtttgtatgggattgagatttccttggccgaccagggattatcgtaaggtcctggtcaatgtgtcgtgtctatgttcgggtccaggtctgttgtcaatccaagggagggctatgtggtgccagggcgagaaacattttcatggccggtgttactatttggttgaagcatcatcatccaggtgagtccaggtaagcaaaagaaaagtcgttcatttttggccaggtcagataggtacacaacggccaggttccatagagcaacggcctaagcagaattctaaagcggatgcttcgaaagaccataagtgtcagggagcaagcacattagcttgaaagattccttggttgattccttggggtcaaagtggttccattattgttgagagacggtggccatagtagtatcggatatccaggcaaagagtcatcaagtcattaagtggttcattccagtgttgtttccagaggcagtggggtccagggtatatcaaaatccgcactcaaactccggtcttagagcagaggcaatgtgaaaagcagaaacatccattggcagtagtccggtggtagtggaaatcaggcgatttgagagtgcaacattaaacacatctcaaagagattcactcagcaggtgctgaaggcaggtaggcaagtatcctgggcagtggttcctcaatggtcgccaaaattggcaaaaaaaaacaagtccgggtgtggtaggtctaaggtccttgggtcctgggcaataggttgtcgacatcctttggcaagcacggctgacaggtacaggtccagacaaagcagataaaaaaaaaaacaacgcataggagaaccaattgaaaagaaaaagtgacgggagctacctattgtgtttgtcgagaagtggcagactaaagagaagcctgggagataacaagaaaacaaatcctgtccgggaagtatgtggcagagagaaaatccttgtggcagtgattggatcaaaaaccagggagtcttaggttaagaaagaagttgtccttggtccagggactgagttgttgaagaggagtatatataagaatgatacacaaggtaatcaaggtagtcgaggtggtgatggtggtggttgtagaaaggggtactcagagttaaggaaggaagaagaagaagaaacagaatggaggaggggatcagcgggtttttagcacacaaaaaaatgaaagctcggacttgagagggtctgtgggccataaaacatggcgtgtgccagtctcgcatcatgcaggagacgagtgcgctgttggcaccgtcaaggccagtgctgtcgactggcggtgatggcatgtgcagatagggggggtggctcggttgactgagtggagggatatctactagcggtgagacgggctcggcgtcttagtgcttggcgagaagtatgattggtgacggccgaaggatgacggtgtaagacgaagtccgagttgagggatcggcaggttcgctcgcgtgttcgatgagatgtccaactcctgtttcacttcagggggatcgtatggaggagaggatcccacgtcagagggccacgggaagtatacctgcagcatgcttgtacagcggttgcgactcgaaatagtacaacatacgcacggagtacacggggtatacggagcagtgaagcaagaaataaatggtaaatgtaaattattccaatcaataaaactaagattactggacgacggcacggggcgagccagtctaccagacccacgttgggcagcaatgcagtcacttttctcctattttcgggtctttgttcagtcagccaagttcgaaagaagtatgagaaaaagatagacaaggttgacaggatcagaaaagtaaaaatggaatatgttttcgttcagcaatccgaagatctcaggtgaactatgctttaatattggttgttcatcacgaaaggcaaatgcccttgggaggcagtaaaagagtgcaaaatcaaaaaataatgataggcttacctgttagcgggatttgtcggaagaaggatgagttggcatgaaacaccaagtcatcacaggtcgtcgagggccgtgagggcagtctggactgtgattgacggagaaaagggaaaagaaaagaagaaaagttttttgtaggtggtcagatcacgtgatacgtgtacatttgtattgtttacactgtttgtctcgatttggagcaaacatccaccccatctgacaacggaggccttatccactctccacattgcattcctcggcatcatgaattggacaggcggccagctgcagcgtcatcacactcgctcaggcctgttgaccaaagctcagaagcagaatttcgctaggtcgagactccaaaagggcacggtcatttccccgccttcgccatttcgaaacttccctgatgaattcaagggctcgagcactagggaggatgagggggcagagacaaatgaaaatcagtcagtcaagaactgttggttgctttggctttgcttccgtcaatccgtgtgggcgtactcgtgctaacctgtgatcgtgctgattctagagttccggaagagtcggactcacatttgactggtcagacctcccatggtgatagtggccatggtgatagtggcttgaccggggtcaagcgccaactgctaaaagaacctgatgtggcagccgtgtctgctgcacgtccactcgaccttgcatttacatctgtcggggatgtcgagcgctttgggaagcgacgaaagctaaacgacaagaacagaaatcgacgggtagcagctaacaacaacgggtctgccttttttgaacggccgagatcccaacgaagaggcagaaatccatcctcggtgattgataccattgaagaagacatccagtttgagatagatggacggccagtggcgcaatccaacggcagctcgggggtggtcatgaacagcatgtcatcccagtcaatgctccttgaccatgaagaatctcctgttacggaacaggacatgggcaaagagaatctgacagctacttggattaccaatctctatccccgttcgcaattccctcagcgcggggctatgccgagcaggctataacgtcgatgctcgttttcatgcaagtcagatgaatgacacatgttctcggatatatcagataggtgttggggaagcacatgcttctcactccttgtgaaccctgtcttcccgggggcggcctgctagtcaaatcgtaggccaacagtatcatggaagtgccgttggattttccgaggtcagcaatatcgcctgacctagaaggaaaacgattacatagtcccataccaaccaaccaaccaaccaacaaatgaatgaatagaccaataagatccttgacccaaccaaatccactgcctaggccattctacatgcacgccgtaaatgcccatgctcctgtacatcgtaagttgcaccggttttccgttcctataggtctaaattgccgtattcggtcgtcacatgattggtagctgcctcccgaagcaacgtcatttccgtctccacaaccatctccaattatcaacggcgcgaagataccaagattaccagttctatcgttcaataatgcgttctatcacactgttggccgcactggccaccaacgcactctcaatcgcgctcccgtggcaatccgccccagatacaaccagcggaacccaactcccgctcgtgatctggcacggtctaggcgatgacttcgaacgcgaagggctggccgaagttgccaatctagccgaagccaccaaccccggcacctacgtgcacctcatccgcctagccaacgacggcagcggcgaccgctccgcaacctttttcggcaacgtaacagagcaaatcgcgctagtctgcgagcagctcgccacagacccaatcctcagcacagcgcccgccgtcaacgcactaggcttctcacagggcggccaattcctccgcgggtacatcgagcggtgcaacacgccgcccgtgcacaacctcgtcacattcggcagccagcacaacggcatctcggcgttcgagtcgtgcgcctacgacaattggttctgcaagggcgcggagcagctcctgcggtcgggacggtggacgagctttgcgcagtcgcgcgtcgtgccggcgcagtacttccgcgatccggaagacctggattcgtacctcgagcacagcaattttctggcggatatcaacaacgagcgggcggtcaagaacgagacgtataagaagaatctggcggcgctgaatcggtttgccatgtttatgtttgaggatgatacggttgctgttccgaaggagagtgctttgttctcggaggttaatgctactactggtgaggtgacggctctgcgcgagaggccgatctataaggaggattgggtcgggctgaagcagctggatgagcaggggaagctggacttcaatactgcccctggagagcatatggatctgtctgaaaagacgctgcgcaaggctttcactcagtactttggtccgctggagaagtcgcgtccttcgccgggtctagttgtgcagcccgtgttctgatcattctcttttgggcgtttgcttttattgtacgatatcccaactgcgtgtgcttcatattttggatactagcctcaaattcgaagtccaatccaacgccgtatggctggttggttacatttatagaactaccatttcttgccatgttcgttctagcaccgtctattttatgtctattgacaatgtagctagttacacaacgctgcgactactcatcgcaagctaacaaaggaaaagaagatgtgcgtgccgacagacaagaaacaagagtccaagcgttcaaaaaaaaatatgcaaatgaaaaagaaaaagacaatgatgggcaccgagccgaagtaaaataaccgacaaaacaaaaaggacatgcgtatcgcaaaccgctgtaaaaccgcgaccggcaaatcaaaacatgaaaaacaagggagggcgaggcaggcgggtgagaaaaaaagaccctaacagaaagaaaattatatagacatatgaagggccatggaatggaaacagctgtggagatgcccgcagaatgatgaggtatgaatcaaacaaagaaaatcaataaggtggccgaccaaggcctccactgcgtcgtgtgctgctagatctgctcggcagagccttggaggcagatatggcagttgccgggcgggatccattcgtcagcttattctcgtttggcgagaggaacccatccaagagcttccgtagttgatcttggtggttgccatttaggtcattggtctcatagtcggttaagagttcgggaatcccagatgtggcaaggctgtggttggaccggctcttgttgcggtttagaggcttgtagtttaaggcattggcatcagccctgtctctcgctggaggtcccgatggggctggtgcggtgaatggacgatcatatgaggccagcgagcgctgtgagtcattcgggaagccacctgggatcgacaagccagttgggaccggtggcacgggagggatgtcttcggctttatcgcctgataggaaaaatgccgcaggcgtggcgcggggtgtctccagtccatcgtcatcgggtgttcgttggctctctggtcggattgaggtagcatctccatctatctcggaaacagagaagttgccgctcatcatgctttcgctcccggaagaaacggaactgtcattcgatgcgtcaagtcgtccacgtagcggactgaggcgtcgatcatgggagtcgctagtaaccgaaagcacgcgtcgaagctcattgacgcgaacaggcgagctcctgcttgaactgttggatgacgagcctgagatctctggaatgctcatgcggcggttatattgggagccggcgggtgagccattcgtagccatgttggtttggttgtagcggggatttgtagtagctcgagagccagataccgatggtgttccagtgctttccttatcgacagctgccaaacatgcctcgcgagaccacggagacaacatctgttccttcacgacggacgggaggtggctctcaacctgggatttgactgttgctgtggagccaagtaccgggaacgtgaatcctcgtgctggggaagaagccgaggaggggctttctggaggagaagataccaatttgcaataagactcctcaatcatatagacaagtccttcgacgttgcagaatggtgtcaataggggtggggaggtggagtcattgtcagacctcttctcgctgtcaaaaacaatggcatgaagatcgactgggggtaggcggattttagaaagccagtatcccttggcctgtcgctgctgaatctcattacttatctcctggcccacgggggaggactggatgtcgaaatgctgagacagcgcaagaaggtatccgtgtaccaagctgccaatgttaacgcgagctgcgaaggaactcaaatccatagatgtaaacaagtcgtcttgcaatttaaagaccatagggacaccgaattgagcggcattcaccccgaggttctcgacaagatttgcaagaagtaggtgcagcaggaggatctcggcttcctcggtcgctgcctcgattgcagcatcgtagatagccaggtgcagaaggcggaggaagttcgactgtgccaccagcgccactttgtccctctgggtcgcagggaccgacgaacctcgtcgagtcggcctatccatctgctcggtgtctttcttgggagtcttgatgtacttgggtgaatctaatcgcaccttgaggtcgttcccattggtctcaatctgcagccatgataagaatgcatcggaataggcatagcgaacatcacgatccacatcacgaagaagtacttgggttccttcccacacatggatcccgactgaatgtctagattctacaccagacatggttgctagcgtttttgaattggccacaaccaagatggccttgacggctcggagagcagtcagtttagcggcagcatgcgagaaggtttctgtgcttgctttgtctccatttgtctctggttcgtcacttgtcgcctcatgtgtcactccggattcctgaacggttgccaatgtggatggcgaggaactatcatggtggagatgaggcttaaagcgcctgagaatggcccgcatcatgtcttcgacttggtctccgtagtatatgtgtgttgcaagatctccaatagactgttccagtagcgtaagaagatcctgtcgttggggagagatttgaaccacgatttcagcttgtcgatttttcttctctccgtctgcagagccagtacgctctgacggtgacagtatctcagaagcgtagtgcatgagtccatagaggacatccatgacactgagtccaatcatgttcacagacgatttgagaagcgaatccaccacagagagaatggtgaatgatgactgtaatgcatcctcctttggggttgtatcatggagaatctccatagctgtgatcaagatgataaaacgaacttgcaccgggcaccagttcgcaatgaggtcgatcagagatgttgcccagttgccacatttgccctcggtaatctcgccgcgcttttcgctctgcgggaagccctttctcgaaatgaactgtagaatgaccgttactacaatacggatctggccccggttactccccgaggcgatagtctgctcaagacagcgcagggccaagacccgtgcatccatttccgcctttcgatccgcctcagcggccgactgcgctgccagctcggggtcaccttctgccacgtccactgtgtgcaccgtgttgacactcattcggcggggtttgggcggctcgcgttcatttgcctcggtttcggatagcttttctttcagtgttatgagaagattctcatcttcagaatagaggttcttcagtataaccggcaaacagagcttcagcaatgttcctccatcggcggtcaaggtctctgagctgaccaccgctctaatagcgcgcaatcccgcatttctccaccggatagccacctgcgggctgaaatctgtgttcgcatttgatgtaaatcccgggtcggcaaggccggtgtaagttcgcacaacttctcggtattgatgtgcaaggctctggtcagccgcgatggccgcaatgtcctgatatcggcagaacatttcgaaggtcacaatcgattcctccaccatatttatatcgttggatcgcagaatggtatcgattactgtcatgacggatcgggcgtagataggaaggtcgcgaggaactttttcgatgattgcagctaggatatgcagcgccacctgaacatttctgtaacgaaatcggtcagtcattcgtcttgtccgagtccgattactcgggcgatcagagtctgcgctcaccctattctgcgtctccagacatctcgggcaaccctcttctccagaaaaccgcagaccttggtcaacttgctgcggcgcgtgctcgtatagtatagcaggtatgagagttcgctggagttcggccgaacctccgacactcccttctggtatttaggataacatttcaaggtcaagacctggtgctttggccggcaagactggcgaacagattccattggaaacgcagtgtcacatgcagttccaggcgggggttccacgaaagaggggaacttggtagtattcgaggtgaaagatgaattagagacaagcgagagtgcctgagagagtattagttaaggtccatgggagagacgttggaatgttcgaaccggcgcaacgtacggagtatgtagatgacaacggggttgatgaggtacttgtgcacggaatagttcagggccgattaccagggggcggggctctgtcgtaacgagtctgaaaaggcacagaaatcttcaaaatgtactgatttgaaaggaatggaagttggaaaggggagatgatagaagaaaaaattaaaacaagattgggctccgggatcatcgggcgtattctatattctacctgttcgtccactcctgtctagtcttacgtatacatagaaggtcctagggtttatctttttcatattgttttcgtgtttcggaagaattgcgcatcaagataatattgttaattccaattgctatccccttcattattaggagagtgtggcgataaccccaaaatgacatagcgtcttcagctcggagatatattgtcggtcatctccaacgccgcttagtcttttcccccgcaattctctgccactgtcgtcagagcaaatggggcacttgaaaaatcggagttcactgggagttcgattgataactccgaaacctcgggggcctgagaatcctcggtcgcacagcacgttcaccaaactcccatgctcaactccgccaaaggggggctcggtggaaatgaaatcaccagagtttgaatttcttgttcgacttaaaaatgtcagggcgcggtgtgttcgtatgacatctcggtcgcagcgatcgtaggatcggaattcaaacgcatcatgtcttcccattttggacatcttcctgcttttcatctgccgtgtcggtttcggcctgggctggttcagggacactgacccctgccagaccttcaatgacctggggtagaataatgtcacggcggaagttctcctcctggagcagtcgaagcgctcgcagtgtgggaccagggtgggtgaggaactgagagtactccggtgtcttccagtaggagtagaggtaggctaggtaggctgcaaatgcctgcgcgtctggcgagggggagtcatcgtcatcgtcggcacgagcgatacccaggagattgggataagtgactgccaagtgtgacaaatagtaagggttggcgagggacgagacaaattcaagttcgagagtaaaacgcgggttggtcaggtttggtcgatcctccatggtgaatctgatagagaacctcggaggattgaaatggcagaagctggagagcttcaaagtgagggtgttacggaaaacgatagcgtccattgaagtaaaaagtatacaaacatcgaagtactactcggtacatttccaactttagctctcatagaattcctatatcaactgcactatttcctcgtctgctcttggtccatatcctcaaaccatatactcttcttcttcccccctcctcaatccccttcgagctcattccaacttctccaaaagcccagccttctccaacgctggcctagcacactcctgagtccagcgagagaccctcaaacgcctcatcctagcttgggcagagcctgacaaagccaaggaagttgcaggtgtcacatactgctggttctcctcgattacccgcagcgcctcatcccaactaccggggtagttcttggtaagggtagtgcctattagcatcaggctttctcctatttccgtgacttcatgcgccctgacgctcacacggtcgtggtataagtgggcgccggcatctttagaggcaatgaagtgaatgtggccgacctcttcgttggtcttgacaaagatggccgagtcgccttctgggggagaggaggcgaagttgtatttgacaatgtagactttgtgtctttggggctccgccaaagtgacgttgaccatggtgtcggtgatactcttcgtggtattgttcatagtagaaaaagttgcttcgagggtttgtctttgcagaaagatatagagagctcgaggagtagacttggggatgatatggaggtagatttacacggcgaacgctgactcttaaatactctttgtctgttttattcttatttctatttctgtttctcttttccaaagaaatcacaaaggcgcctctccattgtttgaagtcagtttcagttccccaagcctatactatggctttaatattactatatctatagaagccaacctgtaagcctataaataccaatagattcaataacaaggactatatagatcacggaacaacagaacaacagaacaacagaacgccaggaccaatggaaccaacagaaccaacagaccagtttcaccagtccacccaaccaaaccaggccattatatcaatggcgtgaagaggcacatcaagatatatttattctcaacaaagtcaaagcctcatggcaaagcaaatcctccgccttctcacgagacatagccaccatttgtttcccgctcagtcgctcagcaggcaagttgcacagcagagagtcccagctcttaggatatcttcgaagacgtgtggtgcccgtgaacaccaactcagtacccttgaatttcgggtgttgggtcgagtatgtcactcgttcacgattgtagcaatacccccagacggcatcgtcggcgaggtagtagtggtcgccagtagaagatccctcctcactaacgaagagggctgagcgggtcgggtgcccggaaggagtgcatagggtgtatacaatgtatacgttgaggtacctcgatgaagattgacccatggtggtatatgtgtgcgattttggaaggatagagagttcaatgatggagagatttggagatgatagagacaggtttatatggcaaatgatacttcttaaatatcttcggaatcatcattactctaaactgatatatatcttggatatacaaactcgaagttacattatcatcggtttctatcgttagcgatccaagtggtcatgaggccttgcgttgaaacgaggccccgtttgagatgatatctatagagaacaatgtattgtcttctaataggcaaaagctatatctcacgaaaaatatgcacggcgcttagcttgaaggtcagtgcgtccaaggaaactccagaactgaatattcgttgccatccaacatacggaatacggagtataaaattccagtaaactctagccagctaaaacatttgctgtgtcactgtacttgtaaaatctaacgaaggcgtggcagagtcattaatgacatgttcagtctaatacttctacagatagagatcagggatgaaaccatgttggaaccaacgagttcaattatcatatccttttcaaactgacatggaaaacagcaatcggtaaaaaaatacatgtctctgaaagcaagactgaagctgagatacaagaaagaaaaaaaccttggaaaaaactccgatcatagccatggtcttatcttaagatcagggcattgtgtttcatggcggtctagaatcagaagcacttggaagcactctcttccgaaagatacgaacgccatgttaggcgccgtgcgttcatcggtgcttgatgctgggtattaacgtgtggaaccatccctccccattgaggagttggatggtgagatagtgagggaatcatggatttgacacatcccggaggtgcacccgagtgagaaaggcccgcttgctacatcgtatatttccgggacaggctcaatgtgtgactgctaggtgacctagtcgctagtccgtctttccggcttgggtttgcgcagactcttcatccggttcaagaacccaccaccaccaccagcagtgtttagcctcgactcttcgtaaggtcgctcgctgatgatcttgtgctccatttgcttaggactgctggacgatcgaactcggccgccctcgaggcgagcttcgatactcgatccctttttgtcccactcttcctcatattcgtcttcttggaagtaggggtttctttcataaccccgggaggttccagaatggctggagctcacctgtggcgcaggggggtagttgtcgtttggataagcaatgcgaccaggagcacctcgtccacgtagtcgctgagccaaactcttcttccgtgcaaggccaccattcggtcccataccgttttcattctcagtctgatggcgtgaaatggcagaccgactagccggagctccatcgaggaaggtgctggttcccagtcccatactctgcggcccatgaatcgggtctactcgggcagtgggatccatgacagccgtctcagcgttgcggctcgcagcggtcgagaagtcggtgtgtccctcctccatcctgccatggaaaaggtcaagatcgatgttagagttgttgggccctgcgccgcccagagccatgttgctggaacccttggggaaagcttgcattggcgcggtacgcacgccgcggcgattgcgatgagggttgcaggcatcaaacggaccatcgtggtggaacactattattgcagttagcatgagccgtatactgaaaaaaccgtgatacttacttccggtaccgtaaatactcgtcacatccaacttatcaatgatatcaagtcgtcgatccttgcggcccgagcgcgatttgccatctttgctgcgactctcacgctcgcgacgccgttcacgtcggcgcttgtcgtcgtcgtcatcaaggtccaacagcgaacctcgatccattaccgaagactccgagttccgccgagcacgacggggcgccttgtccttggaggtttgggacaaagcaggggggtcggcgaatatgtcgagcagatctttctgttttgacaccgccggtcgtcctgctggacgctccgggcgctcccttgagggtttggtgcgattcgagggagtgcgttgggtggcgtcagacgccgcaggccgaggaagatttatctggggggcaggcttgagggagagggattcctattaagaggttagaccagatttgagtatgtaggttcaagattccgaaacatacaaagagctcccgagtgttggacgacatatcattcttctcaattggagagaacatattggcactagtcgacacgccaggggtcggctgcagaggtataccctcagcgtcgtctaagaatgggtttgtagagcgtgggcgttccggacggttgatcgatgaaatggatccaggcgaaagagcgcggttccggaaggggttattggagccaaaactggccgctgttggagaatcttggtattctgttggtcgcagagacgttttgaatcagtcacaggtctgaaaaagatagaagaccagaaagtcaagggaaggtgtcatttatggatcaggggaggggggttcaaactacccccagcggtaacgtctgatatcctatgatttaggggaggtcaagcttctggttacgtaccctgcggggccagcgacacgccaggcgcatatccaaacgctggagtggcattcattgtgaaggatatttcgcctctgaaacaaggtgtgggtggagaggccgtttgcgtgcaatgagatgccgcgttaggtgtcgcacgaatgcggaagaaagtggcaggaggtagtgctgaaacagtgataatcaggggtaagatagtatggactaccacaggtcaagttcaacattcaataagcgagaaggtataacagaatcaaagtgaaagaaagaaaaagaagtctaagggagaaaggagggggggcaaggggattagggaacacgggagaggcgagcatacgtaaattgcccagtgatcgtctccttggggaaatcatcctctttcacttggccctgtcgatctttctatttctttctttacattatatgtgttcatgtttttatgctatgccgttcgggcttgtgttaactttttctcgctctgccgaatccccagactggcgttatagccgtagaggctaataccaaatcatcgccaaggttccactttgacatgttgtgacagttcaggaactgactgctatgtactctgtacattgacttcgactggacatctggggacatcccagctaatcaggcacgtactttgtacattgtacataaagggatggagattcctcggctaccaaaaatagcccaccccggggaatgacgttgccattccaccttgatatcatcttctgttcctggaatgtgtatgcaacatgatatcttctgttactttccgcatctccagatctcgtgcagtctagaaagatccaaagtgatgagctcatctgccgagggagaaggacgcaacttcacttgcagtccccgtggataccactaaaaaggttgggatatcagttatggccaatgagcggtggctgaatatgaccgattcgaatgctagttcgctgtatctgcatataaaaccttgcatttcgaatataatgccagcctctccagacagtttagccgacatctatctagtatgcggagaagtattcgggactcggtactccatagatatcgaacattcttcggcttggaatgcgatctaagatgaggtcataacttgaattaagatatcattggacttgcatacgcagacgaattaggtagaaactacctgttttgttcgggttgaatagtgaatcggtcaaccctagccgccttaatgcgatatctcaaggtggatgtggctacgtcagatctgaacctacctgtgttatcggaataccatgttggatttactgctatgtgtcatagcagccctaggattttcgtatgcgctacggtccattcatcccaataaagtagagtagttttgggcgtacgcagcctgctaccacctcaacatacaaattcgaaatatcattcattgattttgtattcattaccgtgtcatggcccaattcgaggacgggtcccctttcataaacgccacacataagatgcaaacaagatggtataaaacacaaaagaaaccattcaacggggaagccccaacccgccttctagaaggccgttcactgggcgatggattgagcccgcggcaggtgagggttggagacagggatgcccgcacggcgcttggactggggctttggtctggagagtgtatatctgaaagtagaaattagtacaagattccactagattcaaggatggagagaaacatacttggcaaatgcacgagagagtgccttcttgcagctgaccttttgactgccgatgaacgaatccacagtaacagcgatggcacggtcaatatctagcgaggagcagtactctgacagacgcatcttgcagaaagattctgcgatacgcatgatcgcttcaagatgacgaacctagaagattggagtaagaaaattgtcactgtatagacggtagggagatgacttactgtaatggggtacgctccggtggcaagggactcgcggcgcatgtctgcgaagagacgggcaaccttgtcctgatcgatctgataaagcttggggtggcaacgctctcgggcatacataatatacttccgcaggagctcctgcgggatctcgccctctttctcctcttcgtctctttgcttctctgctgcgcgtttggcgatctcctcctgtgatggaggcagtctctgaccatctcggttgatgcggtaaccctcgttgtcaataagattgccgtcggtatcaactaactcgcccttttcgttccggaggggacgagcggggttggaccggtggtgtgattcaatcacgaagttggccaagcgctcatcctcggcagggtcaaccaaatcacgcaccacacagagaatatcgaaacgagacaagatagggtccgtcaagtcgacattctcggagaatgggatagagctgttgtaccgaccacccttggggttagccgcggacacgacagcacagcgagcctgcaatgttgtcacaataccggccttggagatagaaatggtttgctgttccatggcttcgtgaatagatgtccgatcctggtcgttcattttgtcaaactcatcgataagacaagtaccccgatcagccaacacaagcgcaccaccttccaacgtccattcgctcgtgagaggatcgcggcgaacactggccgtgagaccaacagcactagcaccctgaccagtggcaaacacagcacggtgggcggtcttctcaacaaacttgagcacttgagacttggcggtaccaggatcacccagaagaagaacgttgatatcaccacgaatgtgcatcttgccctgggcctctttactaacaccaccaaagagtgaaagtgcaacagcagtcttgacatcctggtggccgtaaatactgggtgccatagagcgaataatcttgtccacaatatcggggtcacgggagagggctcggattgcgcgctcatcctcttctgtcagattgaaaccagccagctgatcgtgtgccttgaccacatggttggcctcaattacggtggcgaaaaccgggaagccgtttttgttgttcagttgggcatcgtagctgttacggtagacgccggtaatctcaatctcatcaccgggtttagcgctatcgattagatcggcaagcaaaacgacctcacgctgccgcggcagacgacctgcgggaaccgagccgggcgactcctgcaaggtcaacttctggtagttgcggtagactgtcttttcagaattgacagtgaagggaccacgcgactggcagttctgacagaacgagatcttcacctccgcactagcttcctgctggaacggacccaaggtgataccgcacttcttgcagaggaacatgacgtacttcaattgcgggaagacaccagttctacgggtaacaacaccactgacacggatcagacagttgagatgcgactggcgcagctggcgtagggtgtaaatgatcggcacatcagtgatgcggacgtggatttcgttgtgaatatcgtgatattgtgggtagtggaatagcgtaacgtcgagcgcaacctgatcaaataccttcaagacttcggtgggttcgttggcgaggaagtatgacaaagctgccttggtctcgctgaggtgggcgtacgacacttcgagtgaagcggagttcacctcacccagtgtcttgattcgattaccgtaaacagactggccagcggcgtcgatgaactctgtcaggaaggccttgaattcacgatagatggagcgaagaacctggggctgtgtcacccagtctgtaatgttggctgccttcacatctgccagttcctccaatgacagctcttccatgccctcatcagccatgtcaatatcttcacgatcctcatcataatggtgtctgcgtcgccggggttggcgcgacagatccagttccatatcgtcctcatcttgtaaaaaggcggcaggcatgcggcgccgacgtgctagttctcggtctctctggtttaggcgggcatctagctgccgacgagttgcggcatcgatttcatcatggtcttcatcatcgtcgatgtatccgtcgttttcatagcgatcttgcgctgcatctcgataatcccgctcgaagttgtcaccgaacagatcaatgccgtcctcgtcttcagccaattcgtcaatgtcatcaatatctggcactagacctctatcctcatcctcatcttcatctcccatgtcaaaggggatcggaggaggggatgagcccaaagcagtggctgcacatgaacatcgtcagtctcaatttgacgcagcccggacaaagaagcaaacatacgactggaaggaggcaatggcgccggggaggacatgtcatcctctctgtctctcttacgagtgttggccccccggccacggtttgcggccgaatcgctggctcggagcggactgtagtgcattagcttttgagcgcagaaaattcaggaggcacactcactccattgtgtgggtatttcagctggcaaaattcaaagaaaaaagatgaacggcaggaaattatgagtatggataagtatatgtatgtttcagaggttttttactcgagtgtgtgatagcgtggttgatagaatgaagggagggagaaggggcggcaaagtcgagttgtgcagagagtcgcgtccaacacgcgacgcgtttcaattaagccccgattaggaaggtgggccttccacgttccctatctttacacaacgggctcctggtttattttctatggcacaatttacagcgctgtaactaataagaacaaaaaaaagaaagaaagaaaccacattagactaaagcaaaaattggaacttgcaaaaagtcaatgaccgacgcagggatcgaacctgcgaccttctgtgaactccaacatatgaaatgtaagacagacgccttaaccacttggccagtcggtcgttggagtgaacattctgtcgcaagtgtgattgatttcatgactagttcctttcaatttcaggccgcctgcccattgagcattcaaccactttccaagtttatagcatgctcaccgctcaacaccggtttgccctttatccactttatacatcgatgtatacaaagatccatcccttccacatcaagttcttgatcaaaacatggatccattaccccaggacaaaacaccgtcgcgacaaatccgtgcggatatcaccgaaatggctgcgaaggctctagtcgataaaaatatccctcttgtagagtggggatcacagatacagtacagatgtggataccctttgatccttagagtaagagatgaaatatcctatccagcaatttagtcgtggggctctactgacttcctaatcctagcttgttgaatgggcggtgcccgatgcgctgctatcgctcgcatcccagaccctatcagaccggggcattccttgtattcccccatccgcagaggctactgcgatatatggacaatgggaacgagcaggctttgttcacagtctagatccagttcgttcgcaccgaatatttctgtacccattgtcgcttctcgacctcactctccaagacaccgtagaagttacatctacctttgaccatacgctgagggtcttgacacctaagcctcgaatgtacatgatatcactaatacgccatcttctcaaccaccctattggtgacagcagcagatatcatgtggaaagtgatcttgttggttttatatcctcttacatatttcatgacccacctctgaatactaagaacgatgaagtcgacgatgagagcgaagaagacttccagaaacgggtggaagaagcagttcggaatatcaaaaccagggattggggctcaacggaggagaaatatttgaccattgctgaacgtgtcgtccgcgactgtcggtctatttcacagctctctagttgcgaataagtgcaaagtcctgcgcctccatcgtgatctcaagcagggcacgaacagtagtatgtagttcatacaacttccgaacccatgaaagcaaatcgtcccttgatttctccgggtagttcgtgaaataaatgcgaagattctttcgagcaagccagttcaagatcgccgtaatatcctcaaagtcaccgcgagcctttctgttactttggggacgggtggattcagcaataaacgcccatctcttgatctttgtaagcacgagaacggaggggtgcacaatagggactataatctgatggttagtaagagttcgaaatctagtataaagtgcaaaggcaaaaggacactaactcgggacatcgccaacgcgtcctggtaagtcgctggcggagacatggtaaagaggaacggaacttgcatcgggtagcctcgaaggtcgatttctgccgccacgaagaatctcaacccgaatcgtaccctgatcgcgcgtaaaaaccaggttattgctctgggagagttggaacccgggcacctggagcagcaggtttcggacatcggctgggtctgcgtcaacgaggatatcaacgtcctaggtagttcaaattagcttgagtgatcgtgcaagtgttgagaagacactgaaagggcgtacatctgtcatcctcattccaccaacaagggacaccgcgtatccaccgataaagccatggcgacagttgccacgggtgagagcagccgtaatctccttggctgttgtatcgagatggtcgaaagtgctatgtatgaactgctcatgtgtttgttccatgatgaagtggtatgtctttctaagtgattggtgctagcgagagatgaacgaagaacaacttgaaataaggttatagagggaaggacctaccacgggaacggcctcaagtacatacctacatgtactagtagtgttcgaattggtgtttgtctttttcttttaatagtcctttttctgttttcatgtctttcttgatctcatttctgaatgtcttccctctttctagtgttatataaagctcatagttttgctcggagatgtggcccggatattatgacccgtgctcccccaagagccaatactcccacgagcaaggctgatcctgcccatatttgcccagccaaatagccacctcccgtgcgcgcgatcaacgctcccgccacggatggcccggtcaagggtccgaagcttatcatagagagcgacatgccgacccgagtgccgatcttgtccaggtctttggtcaatgaaggaatagtgccagcgaacaagcccatagcggccgccgatgccagtccataaaacacagcaaagatatataactcggccacagtatgaacggcggcccagcagaacatcagaatgccgcacagcgctacccaaggaatcagtaggttgagcggcccgatataacgatcggccagatagccacaaggggcgcgaatgggtatcccaagggcgttggtgacgataattaaattcactccggcttcttgggacaatctgagcttttcagtcgcatagacttgcacctggaaaaccgtcagcccaattaattatagatcttggatttggcagcgtacgtagaagaaggcaaaataaagggtccagtatagaaggaatacccccaaggtaaaaagcatgtaggccggttccttgaaagcgctccattcaatcagtggtcccgctttgcgtggtggtagtcgaggacgcaaaagtgctaaggtgattatgaccatgatgagcacgacaaatcccatacacctgacagcccatggaaaccctgattatgtatttatctgattagctatgaaaaccagtgcggctgaaatagacttaccgatcttcggggtaagatactggatcattgcagggaaaatcatgccccccgtacttgttcccgtggcagcagctgtgacggcaaagacccgatagcggacaaagtatgtcgagatcaatgtcacagtaggcagccacatgagaccctggccgatgccaatacaaagtccctgagccagaaagatctgccagtaatccgtggccagactcgtcataaaggtcccgataactaacagcagcccacctagggctaccaccggccttgccaatccagcatctgttgcgcggccggagagcgttgagataaacaaaagacagaagacttggaatccaccgatccacgaaatatcggagggggcttgtggtagcgtagactcataataattttggaacaccccgaagctggaggcgtagccccaagtcagggctacgaccaagtgtcctgcaacgacctgagcccaggcatgaaatccgccatctggaggtgggggcaatggtgcatttgacgtatctctcactggcgcatttggtgtttgggtattgttccctttctcttccccgctcgcaattgctccggaagactcgtaggctgtcatatttcgctcttgggagaaaaaaagcaccctcaagaagagcagattaaaaatgatatagatgcatggggggaaaaaagggtggggatctcagagcacaaaaactggatggattagaaatccatggatgatccctgtctttgtatgtcaccatcagatagcgggtttagaaaatacacttttgtctttggatagggcaaataaatagggcaaataaagaaactatagtcttagtttcctacaggaatgctccttgaattggggtagagctatgtgtcaaggtgagtaatagcattataaaccaagtatggagtaaaagattgggagcgggaacatgcaaagggctaaccttggaatatcctgaaaattccaatacacatggagttacggagtcctctgtaatgtgtataggattgaagtcaagatctgcatactagtatactagatttccctccaaacggtctggtagccggtctagtatatgtctcaggtatagacccaagcattcctgggaccgggccttcctcaagatgtcatgaaggcccatgttcattcaagacattctgtacaaaggttctcgtcttgtaagtgacttatggcttgctccatggctgaccaatcaaggtcaaagtgagatttgcgggatacccagggcgggatatcccgcctgttccaccgcccctccgctccacccatctctgtgcctatccaatctaacaagcaagcacaattattgcaaagctattgagataaatgcaaatgatttttatcctaaaatgtttctaacgtagctttttgcctggtgggcaggcatatgatcttgcgacaaatcagtccttccagttgaggtgcaagctttgtgaaaaatttcagtcaagccgcctcattgagatcaatacataaatgtagatcctctaggcctttcaatgtagagagtagagagtcaaattgttcttcggagagggcaattctggggccgatattaccacagaaattggaatagtaggtatatagctttcggggtctgcagcttgagccatatagtgtaagaaaaagcttcgataattctaaggagtttagtttccttatctagctacactgaccagtatgggtaaacgctcataggctataaatatcgaacaaaaaatcaatccggcttattatctatcgccttcctaggaatagaactgtctactactatagattaagcaaaaattccgttctataatctgcgagtcctaatgtttaggggttctgaaatcgatcttatattcccgaagttgaatactaaacgcttctgattctagtagattggaattgtctgtaggtatagctttatagatagtataccgactttccagcttattgccattaacttgtcggcagcttttcgatagtatatatactatactaagggacttttcagtaccattgaatagagttagtattatctatagctcttagatatacttacagagaccatttgacttggatagttcttctagtttatagagaatttcgcttatcacaatgaaacggatttttcggcaaaggtatccgcgaaattctccagtgagttcttgtacaaagtacggcatgataatctcagagcgaccaattgctggaaatccaactggttatatatctttgagattaattccacgggcagagctgcaatggatattttggctgcgtgtgtgacgtttcaagattgagaacaatgataataagaggctcgatttgttatccgcagaaatgagtgttaatcagccttactctctagggctccgggctctcttctccctttgacgagaaagcgaaagcaaggtaagatttctgcgccgagagacaatgagaagagtagtgcaacttgcttcttctttctctcctaatcttagttattttgaatagaatacactctgcttccttagcaaatcacaggtatctgctgtcttagctactatcatatgcagtttggtacaaaagcggtatacaaattctcagctaaaaccggcacctgcatgtctatctagcgtgcttgttccacttatgtagagaaaacataagcccatgggcggtgtagggcggtaacgcctgcatttgttggaaaatgccggcagaaactttaagttacgtcgcgacccatcacgtcgcgtcgtgatccaacatatcgcctcgacacttaggacttaggcctttcgttatttgtcaatttctacgataaggacgctgatacaattcccaaacatggacgccccgcactcggttgttgctcaactcaccgaagatgctcgtagtgagagcatgggctcccagaattcccagaccgcgaaagagtatgtctccccaatactctcccccacactaggaaagtgatatactaattgattttaggtttattgaatcccagctccaactagaggcagatgcgcgcgaggctcttccttatgtcagtgtcccaagaaagcaggtggcgcggcgtttgacttatctcaacagctgacttattgactttagacctttgactcttgcacatatgaccttggaccattgcgacaggtactctttgcatgtctcacctgcaatcctcctcctgtcagccccaacgaaccctacactgccgctgccgtctgttactcgtgctcgatcgcttgtcacggcgagcataccctagtcgagctcttcaacaagcgcaacttcgtctgcgactgtggaaccacccgtttaccatcatcttcttgttgcacactccgtgaagatcccacaaccggcaaaaagggtgtgcactcccaagaggctgcagcaggcaacacatataaccataactttcgcaatcagttctgtggctgcggcgaacagtacgatgcggattcagaaaaggggacaatgtaccagtgcctaggacttggcaccgtcgagactggaggctgtggcgaggactggtggcacccggagtgtttgatcggcttgtcgcgtggttggaacaaggctgccctcaaggccaacggactcggtggcggtgatgccaccaatgacacttcagccgagggcgaagaagatctgcccccacctggctttcccgcagaggatgattttgaccatctgatttgcttcaaatgcgtcgactctaacccctggatcaaaccatatgcgggcactcctgggttcttgccgccagttttccgagaaggtggactaaaaaaggcctcgaatggggctgagctaaatatgactgagccaaacccctccgtacccgccactgagctcaaagagactgaacacaaggatcaggagaagatcgaacactcaaacaagcgcaaggcagacgacgagggtccgaccgaaggagagcctatcaccaagcggattaaagaggaagaagctcatgtcgaggaacaaccatcgaatgtcacaaaggaagaggagcctaccaaggaggaaaacgatactcctacaaagccatccgcccccaagcacacagagctcccgaagtccactccagtggaatcattctctctttttgccttggatgatttccatgggcagctgtgtcgctgtgcagagtgcttccctaagcttattccctacccccagcttcgcgaagaagaagatacctatgagcctccgatgtccgacgacggcctggctgatggtaccgcaagtgtcggtactggcagcatctacgaccgcggcgaagcagcactaaacaacatggatcgagtgcgcgccatcgaaggtgcaatggcatacaaccatctgcgtgacaaactcaaggtctttctgcaacccttcgctgagagtggacaggctgtcagcgcggaagatatcaagggatacttcgaggcgctacgtggtgatgagcagggcatcaaagatgccgctcatcacgcttctaccgtgaatggtgacggcaaggatgatactcacggagataagtgacacgagcagcatggcatatgactgactgtcaatttcttgtctgattcaccgaaaccgactcttcgctttggtcgcaaggtactgattatctttttttttctcgcaatctttttatcctttcggcgttatcatcatcgggtgctatatgggggtcttcgggggtggttcaacatgtacgatatttagcgaatatgggattgggaaattgggcaatggtgggaggtatgagtacgaacggcgcatcgtatgcaattgaaatgattactatctagcagagctcgaatgactccttcaattggggatcaacccaccttcatggtacaaatacagtggtctcatagcctccgggctaaatggccatgatgcaaccccccgagttataacgccaataccgaattaaatatatgatgtgggtggatatcatggccagcctgtccacgcaccgcaaaatatgatcaacagatatgcagcaagaatgaaaagactactccttgaggcgcttggaagccctcatcaatgaatcatctgggagtccactccgtttggtgccaggaagactaccggtgcgaatatcattgtcatcttgggtgacccgacggtgtgggtatttgccctcgataccctcgaagcagttaccactgatagggccaccattggtaaagtacgggtgctcaagcgcctgctcggcagtgagtcgcttcgctgggtcatattcaagcatacgcgacagaagatcgaatccatcggcgccaggagtgccagcactggaggtggacgtgtatccgccgttcttcaaacagctctgataccagccttcaagattagagccgcgatggaaatgtgaaggttggcggtggagcactagggtctggagttgggaatattcaggcatggaggctagacccggccaggactctttgcggggaagaccgaggatttcgacaatcttcatcatctggttacgttggaaagggactgttttcttgctgtccattttggcttcttcgcctttgaagattggtcgcagcgagagtagttcggcgaagatgcatcctattgcccacatatcgacggcaggagtatagtgccggctccccatgagcagctcgggtgcacggtaccagattgtgacgacgaccttgtctcccgagaacagggagttgagtggcttatagaacaggcgcgctagccccaagtcgccgatgcgaatggcgccacttgaggtgacgagaatattggctggtttcaaatcacgatgcaggacccaattaatatgaagatagagcaatccattcaacaactggaacatgatagaccggaccatagtcgccggaatggcatgtcgctgaggctgggtgtgatgatgaatgatctggagcaaatcatgctctgtatattcaaataccatgaagatgcatttgtcctccagaatgatctcttctagttggacaacattggcatgtgagagttcagtgcacaatgccatttcacggatagccgactgcgacaaacctgtgtactggatcgtttcgccttccttgtcgggcttgaatctggatgaggttagaatgaaaaaaaaaatcaaatgttggagggtttttacttcttgattgcaaactcccctttcttgccatttttcccgacggccttgtacacccggccataggtgccactgctgataaagcctactatgttataccgatctcggacccggactttgctggtatacccaccgggtcttcttgattcaatggcatctgtataaactcccagttagcatattccggttgccggattgagaatggaatgccaggcgagaatcccttccaatttgcacactcgcatcacaaagacaatatcatcacagagaatcaaagggaaagagttaccacgagaatagaatcctccagaattcaagaaagggaaaccctttccaaacatgatggaaagatagaaagagacaagccgttacaccaagaagccacgagtaatcagattcaaagaagatatataattaccatcgacagtagcctggtgactccgtttcaagttaccgactctggttcgcgagagagagccggaggaagagggcgggtttgtcagactcatttgtggatcagaagggccggcgatgttgtcactccattggcggggagatatcttctccgcgatttccagtttgaatacagagaaggattcgaaggattcgagagatattctaatgtattgcctgtatcgtctgaattgtaccccgtatgttgtacaatgcgatgagttcagcggagtcaacgcttagtcagatcacatgtcggatccatccagcttcaacttcttgtagcttcacatgttcttcaagtcaactagttcaagtccctgaattgtgaaggactctatgtgctaaatttaatgttacatttgcctacctaggcagaccttcccgtctgaccaacttgacctcagatcatcgtatctctacaatcagcaaaaaacgtcatcctaggctccggccctccctaacgtaccttcaacctgtcccggggcatcgattggcctaaatttatctcacaatggttttgggcacattaacacagtcgagggttacaccgtacttgatctatctcgtatttattgtcacgcttggtccgcttcaatttggcttccacctggtacgatagcatccctctatgtctactaaacatcactaatacgttcattacttaggcagagctcaatgcccctaaatctgtgataacatgtgaacgtcaagggattcattcttcgggaatcacgagtcttccacaatgctttcctatgaccccatcgcaatttggcctcgtctcttcgatctacacgctcggtggcttacttggagccctgctagcaggacccatcgcaaccaaatatggacgtctacttgcattacgagtcaccacgatattctttattctggggcctgtggcggagacacttgcaccagcaatttccctcttgagtcttggtagatttctctctggaattggttctggtgctgcaattgtggttggtcctatctacatttcggaaattgctcctcccagttctcgaggcctcttcggtgccttcacccaggtcatgaccaatgtcggtattttgttgacacaatccctgggatacttctggagcaaagcaagcctctggagactcatactggctgtggccggaatcatcggggccctggagctcttggggttgttcttggtaccagaaagtccttcgtggctcgcagaacaccagaagatcagtcaggcacgccgcgtcctgcagcggatccgcggtcgggatgccgacattgaagcggagattgagagttggagcacctcagatgtccctgcatctggcgaggaagagtccttgctctctaattcttccggtgacaggccgtctagaaaggctgcagtcacgttcatgcaggttgtcaaagacccctattaccgcccggctattattgctgtggttggcgtgatggtcgcccagcaactcaccgggatgaacagcattgttatgtacagcgtgtctttactccaaagcatcctaccaacgacggctgcgctactcacagtaattatatctgcggttaatctcgtgatcacgctggcgtgctctcccctgcccgatcgcattggccgaaaattgtgcctgatgctgagcatctgcggtatgggctgcagttccatacttctcgcgataagtatcttcatgagcgctaagattttgacggcgatcgctgccttactttttgtggcaagttttgcggtcggactaggcccggtcccctttatcctggcctccgagctcgtagggcccgaagctgtcggcgcggcacagagctgggcgcttggtgccaactggatcgcaacctttgtggtggcacaattcttcccagtgctcgatgatgcccttggtggccgtggacaggtatactgggtgtttgcagctatggctgggttgttcggtgtcttcatctatcgatatgtgccggaaaccaagggcagagctaatgccgacgaggtttggggacgagccgaccgacgacaagactgactccagatgagtcctattctagaaatttcatagcactatgatttccaggttgttcctcggctaaactacatagtagcactcaatatttgtataggatgcggggttactgcagggccggagtacattgcataagttgtacaagttttttttttagaaacaaagcaatacatacagtatgtccatggcatcgccaagtacacaataggcatccatttttccaattgccaccttatgatcctataataacctgcggtgtggaggtttctttgatgtcgacccccgtcgacccccgttgaccgcaattggcagtgtttctcccacttttccccctcaagtttctctgcaattccgttgagatcggccgatcatattcaaccaatccctgtttttggaaataacggagagaacctggaaattacagtgggtaaatccgtttcttggcctgtgatcgacccgggacacaaccagcggatcggcgatcagctctggggggctcttgaacgtcaatcgtctcgaccagggagcaagccacccgccccaaccctttctattccccctactttcttttcccttcttataatttttctcatttgtgtacatccgcaatggtccggttggctctcccccaacggttgagctcgcacctttcggcgaagagcgcgccgtcgactcccggacggagcagaagcaccagtccgttacgatcaccggaactcaaacctctgctgctgaaggtttcagtaatccgagtaagtgctgaacaattgtggaccattttcatgttggtgggctccctgactgattccaatggtttgattagggacgtaacctcgcagccaaagatcgaggtggcacgagcgacccagtaagcaccctgcgatcaaagacaattcgaatcgtgaccgcttacatgttgcacagtatttggtgattacattaggagatgcgaggcagtcgacgccgaccatattcaagaccctgaacccggaatggaacgtctccttcgacatgcccgtgatgggcgtgccgctgttggaagctctatgttgggatcatgatcgattcggcaaggattacctgggcgaattcgatatcgcattggaggacatatttgctgatggccaggtggaccaacaggtaggtgaagggacacgttgctcggacaattggggactcgggctgacttgattcatagcctaaatggtatactttgaattccaagcggaaggcgtctaaaaagaaggatagcactgtgtcgggcgagattctgctgcagttctcgctcgccgattctgcgaaccccgctgccacgccggcggaaatattctccaagttcaagaaattggtatactcgggtgatgaggatgaccagaactctcagatccctcccgccgatcttgatgacttggaccgggacgaggatagctccgatgagcctgatgacgcggcaggtggcccagaaggcggcccagaagggggagaaaagcgccggcgacttcgattggctcgcttgagacgcaagtccctggcagctcgtgcataccaattctcaggctcgggcaccggagtgcaaggtatcgttttcatggaaattgttcgcgtgaccgatctgcctcctgaacgaaatggtatgaatcattctcctgcacgcagaacgctagatgctaattgacgttctagtaacgcggacatcgttcgatatggatccttttgtcgtgacctctctaggaaggaaaaccttaagaactcctgtcatccgccataacctgaacccagagtatcatgagaaaatggtgtttcaggtgatgcggcacgaacagtcttataccatcagcttcagtgtgatagatcgagacaagttctccgggaatgactttgtcgcctctgcgggtttttctctgcggaatctcatccagtccggcccagaagcagaccccgagacgggattatatcactttgtagaggacctggaggaacctgatcacactaaaggtaccaagatagctcagcgacctggagttagaccctcgcattcttcgtcaagtctctccaaactggctcggcctataataaagacgcgccactccgcaacatcagtctcaagccaatcaatgctcgaagcgccaacgcccagtctccttacaccttcttccctcccagaagaaggaatttcagagatggatagtactaattcattggcgaccctgaacatgtatgatggcgagtcagccccgattgacgagaacggcttcagatcatatactattccccttatgctcaagaatagagaacggtgggaagacaaacattcgccagagctgcatgtcaagacgaagtatctgccatacagtgctctccgacagcatttctggaggttgatgctcaagcaatatgacgccgacgagagtggtcgcattgacaaggtggagatgacgacaatgcttgacactctcggttcgacgctaaaggagtcgacaattgacagtttcttcaaacgcttcagcgcggacaataagtctaatgaaaacgatgatttgacattcgaccaggcagtcatttgtctcgaggacacgcttcaaaccctgcagaagagaaattcaatggctgctcccagagcgctttcgcttcctctgtcaaacgccggaagccaagatagtgagccatctagcagcgacgagcacactttggaaaccaacaccattgctgctcttaatgccgatccgcacaacacatctattccaaccctgtccaatgaggaacaatccagttccgctgatgagtacctccagcccgatgatctcgcggacgatgggggcgaggagcacgtcgtcgaaattcgcgagtgcccactctgccaccagccacgtcttgggaaacgctctgatgcggatatcatcacgcacattgccacgtgcgcaagtcaggattggcgtcaggttgacaacttagttatgggtggttttgtgacttccagccaggcacagcgcaagtggtactccaaagtcattacaaagatctcatacggcgggtacaaactcggagcgaactcggccaatatccttgtacaagaccggatcaccggtcagataaacgaggaacgcatgagtgtatatgtgcgactcgggatccggctgctatataagggcatcaaaagtcgtgatatggaaaagaagcgaagtacgtaacccttgagctcaagtgtatatgttgacgaaaagatctgtttgctaacaaattctattagttcgccgtgtattgcgctctttgagtgtcaagcagggtcgcaaatacgatgacccagcctcggcatcgcagatcaaggactttatcaatttccaccagctggacatgtccgaagttctgatgcccctagagaacttccgcaatttcaatgaattcttctaccgtgccctcaagcccgatgcccgtccgtgctccgctcccgacgaacctaagattgttgtgtctcccgccgactgtcgctcggtggtatttgatcgcttgagcgatgcaactagcatctgggtcaagggccgtgagttctcgattgaaaggttgttaggcaatgcttacccggacgatgctgctcgataccgaaacggtgctgtcggagtgttccgtctggcacctcaagactaccaccgcttccacatccccgtagatggaataatgggtgaacccaagaccatcgagggcgagtattatacggtgaatcccatggcgatccgatccgccttggatgtatacggcgagaatgtccgcattctcgtccctattgactctgtcgcgcatggccgagtaatggttgtctgcgttggtgccatgatggtcggcagtacggtcatcacccggacagccggcgagaaggtttcacgagctgaagagctgggctacttcaaatttggtggcagcacccttctagtgctctttgaaaatggcaagctcaatttcgacaaggacctagcggaaaactccaagtgtgcactggaaactttggtaagagccgaactgatttatcttttttcatacttgatcaattgcatactaacactcctatcttatagatccgagttggcatgtcggtcggacacagcccggatattcctcagtatgaacctgatatgcccaagcagtcggagaacgtcactgccgaggaaatgcaagaagccaagcgccgcatcgagggcagccttgcaccaagcaagccctccaccctactcaagtcattccaatgatcctataatctgtctttctttttccttggagtggacagggctcaactcccaccgctctttctcactgaacatattgtttttcaacatcggtgtcggggtgttctttgttttccggtgaaaacatcatagcgtttatctagcagcatctgcgcattgcgaggattgggggtagaagaaatcagggtgttgcattttagagccagtcattcattaataacgcttaatatttgggatcatttaggtaaaagcagtagttagagtgatcaaagtagtagagcaacgttgaagtataacggtcgatagtcctaaactagactagcgcggtccccacgcgcccgaccaaaacaaccgcgtgcaagaatccaacccaccactcacaccccaacctgccgctcccttgcgtgtctttttcgcgattgaattgaaaaagtcgcctagtctgctgctccgcagctgcagttctgaattgggacgcgacccgcgcctaacattccgcgagccgactgccccgacctcaattcaaccgtgccacaaccctatacacacattaggtacccattgatcaacaaacggtctgattcggcaagaccgtgtcgagatcgatcagccgtttaggggggttaactcgagtccagcattcatacgcacacgggaatcgcgcttgttgttcctccaggaagcctcttcaaccaggggtatttgactggagaacaggacgtcacgaagcgactagtcgacaccggaacgggggtgtttgctttgccacccctaggtttattcccgagcacaataaccccgcgtgaacccctcctgacatgacagtcgcggtcctggcgaccacaacgaccaagacaaagcgtcgccaaccgctggggacgatttcaatggccggtccgaagacacaatcgcgctctgcaactgcgtacagtggaaccgtgaaggccaaggaacagaggactacgcgactcagcgcaagtaaacaagatctcgagcagagcacaaacaagctagggaagcggccagctggtgagtaatgtgccggggttggaagttgttgagcggtgttgaaagaatatgctaattcatctctagtggcatatgaggaggatgcagaagggttccagttctctctactaccatcaaagaagcccaggccatcaatcgaagcggtcccggaaatgccccattcagacgtggaaaatgcgcctcccaagtccacgccgaaaagaggacgcccacgaaaaaagccaacgggcgacgagaccacttcaagtacggtgccagcaaaggggaaaagcattgagcttccaagtaggagacctacgagaggaactgcgaagactacacacacagaatctgaatctcaaccaacaaacacgattcgcccatcacgaactcgcgacagcccagagcaccagccggaggcaaaaaagccgaaaaaagcaggacgaccaccaaaagccaaaaaacaagtgcaagtgtctgagtcaaatggatataattccccagtgcaaccgccagagggtacaaaggtggcactgccggtggccgatactccggtgattcagcgcaataaagagttcagaggcggaaagggtgataaaaacgataaagggcgacggcgaagcagcttgggtatgcgaggacgaagggccagttttttgatcgactcagggacatcaaatggtaagattctcggtctgcatgggctataaatggtcgaatgctgattttgtctcttttcttgtacagcattaccccatagagaagttggcacagcagatttttacaagcacatcgccgatgacggaatccctgaaccgcgaaggatgcgacaactattgatttggtgtgcgactcgtgcactaggggaaaagccctcaggaggctccaactcggacgatcaaagtgcgcgcttagcaggtacgtggaaccgtttacttacctagagggattttttatctgaccatttctagcgcgtgtgattcaagaggagcttcttcaggatttttcaaacaactcggagctttccaactggcttggtcgcgaagatttgaaccctccagccgtggtggtcaaaaaaccgaacccgcgaaacctgcaaaatacagacaagattaaggaattggaggagcatatacagaagtatgtgtatcaccaagagctgtctcgagtgtatagaactaacgaacttccagattacacaaagaaagacaatctctcaatgcgcttcttcgacagccagcgatcccaaccgttaaggctaaacctcaatctgacgacctacacaaagataagcaagcttcacgtaaatcacaacgcgaagaagtcgacccctctctcctcgatccctcacaacaagccatactagaattccttaatctcccgaatcagccagagggagaatcctctgccccatcctcaatccgaccacctatcacaccatctgccgtctctgctcaattatcacgcatcacatctgggctggcaccgacactcgatgccttcgcagccggtgtacatgacatcgaactataccgtgcctccgcggataccgtttcatcccgaatattacgcatctgtgcacagcgactggaagagcgcgatgcgcagaacacacaacgtcgcctcgcaatagaaggcaacgatgatgaacatccaccaccaacgagaattaaggaagatttgggtctcattctgggagctcttagtcgggtggagagacgatagaaaatactgttcattcgcttttctaggagatttctcctacgtatattcccaataatctgttttccagcgattcggcattcgttttcctttcttccttttttctgttcccttcggggattcaccatgaatgaattgattgatagcgatgatcttgacgaaaccccagcccaacaccatgggatggggaaaggcgcatttacaatggcatttcaattgtttgataagctcagagtttggggtttggatttgcaattctgagatatctgatgctccgcaaagtgcagagattcaagatgaagtgaataggtagtcaggtacctaatacatgccgtcaactaataaaaggctagaattgagatacttattcgatcccatctctacttcactggtcttgatataagttttagttttgagctcatggattctaggcgtcgatcttataggcccaggcgccttccttaacgagcttagtcagggatgctctcgacttgcttcttacagtgacggtgcataagtttggacacctcttcgtcgagattctccaatttcgggcttctcaccttcgcgctctcttccaaatcttcacacgagctctatcacaaactcaaagtccatccgaactggggatatgtcatatatcgcaccacttattcccctgaatctgacgcccacttctccactgcggtcaagtatgtcgaggcctttgtcaagaaatcattctttagggaatgcgcatctaaaaacgagagttcacctagcgtagatcccgccatttacgaggaaatccaggccaaatatagttcaaccgtcatagaagatgcggctctctttgatggtgcctcaattgattcgatacgcgctcattttgaggcatgggtggatgtccagggtcagcgtgattctttcaacaaataccgaatgtgcatagtcattgatgaggaatgtctgcaaacgctgctgggtacatcggcggaggccctagagcaggagactgaatacaagagagacaaaacaaagcgttatgtaaaaatcgagcacgctgcttcacccccggctattgtccttcgatatctagatgacgatcttttagaagcatccaatagccaacgcctcatcgacagacatcaagcccaccaatgtactagtgaactacggaaatggcgaatcctattccgtcatatttcgctaagatacatacaacgacaaagttcagacaaacagttttgttcttcccatctcgatattcatatatgacaccccagatgaaaaactaagaaaataaaaggacaggcacacgcgaaaggagagcctcgatgagtttagtcgtgactcgtgagaatcgtagcttctatatatgtccaaacggagaaggtcgggatagttagtcgatatagacttgatcggcgaggaaaatagagggaaagaaagaccgagatgacgcagcaaagaggctaataatactagcctttgcatttgccagtctcataaaacagaaaacaattagaatacagcaagtaaa
